United States Patent Application Publication US 2026/0191916 A1 - sequence listing, part 26

SEQ ID NO: 75 - DNA, 2833895 bp, Monoglobus pectinilyticus (residues 1-1,416,948 of 2,833,895)
  source 1..2833895: mol_type = genomic DNA
gtgtataacgtttgtcaccattgcttctacctgtgcatagtcaaacttttttgtgttcaccttccaattctgcattacgtcttcacctgtggttatcggagccgccatcattgtgattctgtcaatcagcgcgtcatagttgacaggcttcaacatacaatattcaacgccgtatgaattggaatatgacgttacagtctcgttcaagactgaacttacaatcagaacatgaggacgtttattcagctgcattctgttgattctctcaagaactcctattccgtctatggtcggcagcaccaaatccattaccaaaacatctacgtcattattctttattaaacttgctacttctaatccatcatgtacacatcctacaacatctatctttgcagactgtctcaaatataagcacaatccatctgcaaaatctttgtcgaaatctgctactgctactttaattttttgattaatttccatttcttttctccctatattgataatttaaaattaattcaccattatatggcaataacaaataattatataaaatacttttattatacttaaaacgattttattcttagttaaaaaataattaaagcagtaacacaattgtaagattattgacataatatggcaatatttgatattcaaattatagtaactttcttttatcttgtcaacccattcgacaaaatatttacaaaaaatcagctattctgtaaataaatataaatttctattatttcaaagataaaaaattttatattttgcactaaaaaaattaagagaaaaaatatacaaattggatataaaaactatattacaagtattgctaaaaaaatatgcttactatccgattatttattaataaataatcagatagtaagcatattaaaacattaaatattaaaaactatttacaatatttttaaaagtatttccgcgctcctcaaaatttttaaataaatcaaaacttgcgcaagcaggagaaagaataacaacgtccccagcttctgcaatttccttagccttcttaacagcatcttcaaaaagagaacacttataaattggaatattattttcattataattttgagctgattttactgcgtcttcaattttatctgctgtaaaaccacataaaaccaaacttttaaccttattattcacaacagaaccaaactcttcaaaaggtatctttttatcatagcctcctgcgattaaaacaacttttttatcaaaagaatttaacccagcagtagttctagcaggcgagctggcaatagaatcattataatatttaactccgtcaagttctctaacaaattctattctatgcgggactccaacaaattcttttgcagtttttctgataatatcatctgaaactaacccatcaaccgcagcgatagcagccatataattttccacattatgcattccgggaatatatatatcttctacgctcaaaatttcgcgttctatatggccgtcattataaaaagatattatcatatcatcattcaaacaatagccattatttaatctatttttgcggctgaagtaaattccatttgcagtttcattattaaattctcttgtgatatcattatcataattgagtactacttttccatcactgccctgatttaaaaatattgtttttttagcactaatatattcatcaaaatcagtatgccaatctaaatgatttggagtaacatttgtgacaacagcaatttttggactcattttcattgtttgtagttgaaaactggataattcaacaacaactttatcattatgttttattttttcaacctcaccaataagcggtgatccaatatttcctcccaaataacaattataaccgcctcgtttaagcatttcataaataagacttgtggtagtggttttaccgtcacttccagtaacggctataatatcagccggacagagttcaaaaaacaattccatttcagaagtaagttctgcgccattttgaaccgctttgctaagagcaggcacgtcaaaccttatacctggagttttaaatataacttttatatcatcatcaattttatcaagataagaatcccctaaaataaaagaaactcccaaggcagataactcactgtaagtatcaccaagctgttctttagttcttctatcatacgctgtcacttttgagcccataccaaccaaaaattttataagtggaacattgctgactccaattcccacaacagcaacaggcttcccattgaccttttttttaaaattctcaataggaactgaatactcattaacctccattttaaatcctccaatacgatattaatattcgcgctcaaaaactaggggcagacaaagtcttgtccgcccctaatgatttaaactaataaagcttatgcttcaggcacttcattaacatcttcagatgccttcttctcagaatcttcgctaacttctgcagaatcaagaatgtctcctaatgtaaagcttgtttcctcaatataagaattaggtaaaacttcttcatttgaatcactgtcagcagttacatcagatgctgaatcggtcataagagctttcattgaaagaccaatctgctttgtatcgtcattaatttcaacgatttcacaatccacaacatcaccaatagccaacacatctgaaggtttgttgattctttcatttgaaatctgagaaatatgaatcagaccatctacatattcagccacttcagcaaaagcaccaaatggaagaattctaacaatcttagcctgaatcttatctcctacatgcagatccttaacagctttaacccaagggctgtcttcttccttcttgtatcccaaagaaactttacccttatctttgtcaagatccttaatataaacttcaagctcctgtccaacactaactatttcagacgggtgtttaattctattccaagataactctgaaatatgaaccaaaccatcaacgccgccaatatctacaaaagcaccgaaaggtgtaatagactttacaataccggtatattttttgccaatctcagcatctttccaaaattcagcagctttttgctctttgagctctctaacaagagaaattctgtttttatctttatcaagttctttaatatatacttcaatttcatctccaactttaacaacctcagaaggatgagaaatacgaatcggagaaagttcagaaatatgaattaatccgtcaacaccgcccaaatcaataaaagctccaaacgatgttaaagacttaactatacccttatattgtttgccttcttctgcagttgcccaaaattcagcagacgctttatcggcagcttcttttgcaactgtcttaatagagccgacaactctctgtcttcctcttctgtcagtatccatcttaataattctaaacttctgctctgtatttaataaaacgcctaagtctgaaagataattcaatgcacattcagaagctggtataaatacacgaactccttttgcaattgtaacaacaccgcctctaaccaactcaacaacacgtcctgaaagcacttcgttgttttcaaaagcagctttaagttcttccatacctttaacagcgtcaattttctttttagaaagagtaacgacaccatctctgtcgctgacatggacaatataaacgtcaacctcttcaccaatctttaccaaatcattaatattatcattagggtcattagtaagttcatcaaaaggtatcactccgtcatacttgcttccaatatcaacttgaacctcagttggtgtgataccgattacaacgccctttactacctcacctgatttcagaggctttaatgtttcctctagtgcctctgcaaaattcatttcattttccgccatggttaaatagacctccttgattaccgactcgggagtagatgctccggcggtaatacctactttcatttttttgtttaataaattattatattgtttttttattattttactattttcaacatgaacagtgttttcacataattccttacaaacttcataaagttttaaagtattagaactgtttttacctcctacaacaaacatcatatctactctagctgccaactcagctgccgatttttgtctttcagaggttgcactacatattgtatcaaaaaaatcggcatttgtaaaatgtttttttaaaatttcttcaacttttttaaataattgccttcttatggtagtttgtgcaacaacggatattggaatatccttcaattttaacagcatatcgtttatatcattctcatctgatataattatagctgaattattacaccacccatttataccaataacttcaggatgttcaggattacctacaataactattgttctgcctttatttatgtattcatccaaaacaatcttgtggattttttttacaaaaggacaagtagcgtcgatcaattttatattatttttttcaaaatattctatatctgatttcggtactccatgagctcttagaatcactcttgaaccaaatggagcgtcacaaggtttttctatcgctgatatacccttttttgcaaggtcgtttgtaacatctgtattatggatcagcattccataggtatatgttaaagaatcatccgctaaattgttttggcttagcttatctttttcacttatacaatcataagctattttgacagctctatcaacgccaaaacaaaaaccagcatttttagctatttctattttcatattatattatctcactatatctttttttaatatacatcatatctgattatttaaaggaatgttagacagctcagatatttttggcataaggagcttgtctgttatctcctgaagctcagctgaatttaatttctcatcaaaatatgatgtcaactctattggcttccctatccgcacaattaatttaccaaaaggtttatactcgccttcaataccaatcggcaagatatttgcccgcgccttaacagcaaccagggcagcacccatttttccttttcttaaacggtctttatgcgaccttcctccttctgggaagatagctatatgcttgccgtcagcaacaagacttatagcagttctcaaagctccaaaatctgattttccgcgttttataggaaacgctccgagagcagtaataagctttccgaaaattttatttttgaataattcttctttagccataaatcctatttcaaaggaaaatgcggttccaacaagcggaggatcaagattgcttttatggttagcgcatattataaatctctcatcaacacttggaatattttcctttccaacgaactttactctaaaaaaaactttaaaaaatgcattaacgacaaatctgccaaatttatataatgtcattgcatttctcctcaactaaagataaaattttatttattacttcatctattgacatgttagtagtgtctaataaaacggcatcatctgcctgttttaacggagcgaaatctctttcactgtcatttttatcacgaaataaaatttcttctctgactgattcaaaatttgtttcagcctttttttctataagttccttatatcttcgtctcgccctttcgtcaacatcagcggttaaaaatattttcagttccgcgtttggaagaacataagtaccaatatctctgccatccataactacgctggatttttcagctaatttacgttgaatatcaacaagtttaagtctgacagaaggtattgttgcaacatttgaagcagcaatcgaaacttcaggttttcttatttcttttgtaacgtcttttccgtttaagaaaaatttctgtccatgttcgtcattttttatttctatagatatattattaattattctctgaagttcagtttcgctcctagtatccaatccagcctttattgcagcaagaccaacgcttctatacatagcgcctgtatcaatataaatataatttaacattttagcaacagacttagaaattgtgctcttacccgcaccggcaggtccatcaatagcaattttcatttttacctcttaattaaaacattttatttctgatgctcagaactatctgatagagcatcagatttatttaataattgacttttatttatattttctttatactcataatcactaatattttcttctgaatctaaaacaaacaattcttttaaaatggagctgaattcatctagattatcataaatatacttatagtcataacctgaattctgagtaaaaataacatttacaccaagttctgatgcagcttttaatttatcaagtatatcaaaagaactatcagttattaaaagtttagcttcaagctttttcagaacgcctttcattccatcaaaactgcttatatcatcaaaatcctttacattcaataatggaattccaaactcaagagccaactcaacatcaaaatcaaaacccgatgaaattggaacatacaaagaatttctatcaaaaaccaaatcagatattgctttaacattatatggttttgaaaaaaatactatattaccgacagtgttatttatctttgatgcaacactttcataagaataatcaacatcacattttatattaacttttttcaagttagagcgttcaaaaggcagtgttggtggaatcaatttaatcaatggcagttttaaatcctcagcgacatttaatgcaaccaaagactcatcacttttgggcgcattaattatgtcaacaacacaatttatattatttttatcaataatacggcagagactcctatagctcattttcccaacaaccgcattacctttcccaaaaaaacctgcatttgagaaagatgaaaaatgaaataaataatttgcatccaatttatcgagaatgcgcgatgtttctcttgccaaattaccaccgtcagagattataagaagcatgattattctcctgttttagaatcgcttttatgcgcgtcattgtccacatgtttatcaggctcatcatcaacaggttcagagctggacggcgagtagtatttatgtgtatcaccataaaactcagcatctacatcctccgaaagtttttcaccgcaataaggacagtaagaacagtgatctttaacgcccttgccgcattttggacatttaacaattgctttataaccgcctaattgatcgtcaagttcttcaagcatatcatttaatttatcaatttcagcacatttatctttaacattttcatcaagcggtgtatgatttttatagctgatatatactgcttcaccaatctgagaatacaaatttttaattgaattactaagatcaaacatcgaatattttaactttgaatattcaacaacttcgccggactttttaaccacagtctgcgcggcagacccaacagcactcattacattttctaaaaaatccataaaaacaactcctttattaatatttcaataaagtattccccaaaaagaatacttttaatattacacattaaatctgaataaaacaatatctccatctttcattacatattcttttccttcagacctcactaagcccttttccttagcggcactcatactgccgcaattcattaaatcatcaaaatgcactacctcagcacggataaaaccgcgttcaaaatcagtgtgaatttttcctgctgcctgcggagcttttgttccctcttttatggtccatgcccttacttccggctttcctgcagtaagataactaataagtcccaaaagtttataactcgcctttattaatttatcaagtcctgattcagcggcaccaagctcatccaagaacatttgcttttcatccttttcaagcccagcaatttcttcttctatctttgctgaaataaccattacctcagctttatcagatttagcatactcttttatcttattaacaaatacattagtatcctcatttgcataatcatcctcagcaacattagcagcgtaaattacaggtttcatcgtgagcagtgcgacatcttcaagcatatctaactcatcatcagtcatatccatagaacgagctgttttaccactttctaaatgcgcctttaatctttcataaaaatcctgatatgcaagatactttttctctccgcctcttatagacttcattatcttgtcaattcttctgtcaagaatttctaaatctgacattattaattcataattaatcgtctctatatcacgcacaggatccacacttccgtcaacatgtacaatattaccatcttcgaaagctctgacaacatgaacaatagcatcaacctcacggatattggataaaaacttgtttcccaaaccttcacctttgcttgcgccttttaccagcccagcaatatcaacaaactctataactgcataagttgttttatccgggtcatacatttcaaccaacttatctattctctcatcaggtacaagaactgtaccgacatttggttctatagtacaaaacggataatttgctgattctgctcctgcttgtgtaattgcattaaatagtgtgctcttaccaacgtttggtaatccgacaattccaagtttcatctgtatatcctctctttatgtgaaatttcaaatctatatgtattattagacgttttaatttaacttagcttcaaaaagattagccaattctcttgctcttttttcaatcaaattctcatcttttccttctatcattactcttacaagaggctccgtaccggacggtcttataaggactcttccggtatctttaaactcattttcgagtgcttctattgcttgtttaatctcaggaaacttcatataattctcttcatttttaagttcattttttacacttgcatttattaaaacctgaggataaacctgcatagcagacgctaattcagacatacgtttacctgaatgctttaaaacagaaaccagttgtattcctgttacaagtccatcacctgtagtattatgttcaagcagtataacatgccccgactgttctccgccaatcaaatggttattttttagcatttcttcaagaacatatcggtctccaaccttagttcttttaatgttaattccgttttcttcacccataacaaaaaatcctagattgctcattacagttgcaacaattgtattatcaggtaatttaccgtttttcttcatatcaagacctatgacggtcataattttgtctccgtcaactatctgaccgttttcgtctatagctaaaactctgtcagcgtcaccatcaaaggccaaccctacatcagccccgcattctgtaacaaaggcagccaaattttcaagatgtgttgaaccgcaattttcatttatgtttatgccatttggtgaatcattaataacgcaaacttctgcgccaagttcttcaagtgcttttttagctgtaactgaagaagcaccgtttgcacagtctatagcaatttttattccatcaaaaacagtgtcacaagttgtttctgcaaatttgatatatttatcaactaaagaatcatcgatagtaatatgtccgatattcttgcctatcggcgactcaattttttcagaattatcaagaataattgattctattctattttcaatttcatcgctgagtttatatccggaaccgctgaaatatttaattccattatgttcaaaaggattatgcgatgcggatatcataactcctgcgtcaaaaccttcacttctaacaagatgggcaatagctggagttggaataactccggcaagaacagcttcagcaccaacactgcatatacctgcaactaaggcggactctaaaattccacctgatattctagtatccttaccgactaatattctaggtttatcaccgcaagtttcagtcaaaacataagcaccggctttaccgattttaaaagctaattcaggcgttaactctccgtctttgttagcaactcctcttacaccatcagttccaaataatctacccataactatcctccaaaatatcaaatgcttacttaacataaacaaaatgtatacaataatttctttaattattatacgctaatgcaataaatttgtcaaacaatattaaaagttttcaaccatcaatgcccggtattgcagctctcaattgcagctaaggcaactcgtattccatccaatgcagcgcttataataccgcccgcatatcctgcgccttcccctgccggatacaatccttgaataccaacagactcaaaattattatccctggcaatcctaaccggcgcagaagttctcatttctactccggtcataatagctcctcctgatgcaaaaccttttatcttattatcaaaatatctcagtccttcacttaatgtgtcagatatgaattcaggaaggcatgaacgcaaatctgacaatactgttttaccagtaaaactaggatttacactttccagctgactgctttttttaccggccaaaaaatctttcgcaagctgcaccggagccgaaaaatcactgccgcctaatttgaaagccattgattcgtatttacgctgaaattctatcccagctaaaggtgagttagtttcaaagtcctcaggtcttactgaaaccaccaacgcgctattagcattttcggcatctcttttataatcgctcattccgttcacaacaagtctttcatcttcggaagaagcattaacaacatatccaccgggacacatacagaacgaataacagcttctgtcttttccattatataccagcttataatcggccggaggcaatgacttccattctactccatattgacttcgacttataaattcttgcttatgttcaattcttactccggcggcaaacggttttgcttcgatttttactcctgctttataaagcatttcataggtatcccggctgctgtgaccaatacttaaaaacaacttgtcacattcgatgactttatcattatttaattcaatttctgaaagttttccgttacgcatttttaatgaggttaaagttgtattaaattgaacttcacatccattatccaacaaatattttctcatatttataagcacgtttctaagcttatcagttccgatatgtggttttgacttatataaaatatcgttaggggcaccgaaccgcacaaaagtttttaaaataaatctctgtctcttgtctttaatacctgtattgagtttaccgtccgaaaaggttcctgctccgccctcaccgaactgcacatttgattccgtattcaattttcccgaattccaaaattcctcaacagacttaactctttcttcaaccatgccgccgcgttcaattataagcggtggatttccggacaatgtcaatatatacgcagtgaacagaccgcatggtcccataccaacgacaaccggacgttttttaaacacttttttactttcaacttttatttcatcattttgagatattatttgcaaattgctatttggtaatatctttgcaccattatttacttccgctgccaccgagtaaatatattttattgattttttgtgcctggcgtcaattgattgacggtatatataaaaattatctgcataaatgcattgctgccgcacaaattcctgagcggcaagcaaaacatcttcaattttatggttgacaggcatctttatattattaattactatttgcacttattttaacctccgacacattatcaaccgttttagcccaagacggcagcaccaatttagaagttatttcatgtccgttttcaaagctggataaagttaccggttctgtctgtatctgcgaataattttctacagaattattatcaccatagatttttatctcgcccggttcacactttaaagtaacacccgacaaagtgtaatcggcattcggaaccactttaaccgattttactttatacagcggacactctgcctgtatcacaggagtattattccaaatccatcttttatctttctcggtaagttcttttccattcgaatcaaataacttaacctgacaatcctgctttaatttaccgtcaatataagcgctgtaatcagtatttataaaatcaatattaacactggcatatgaaacattatctatatttgactgtgcaccaaatactctgattttatcttgtgacagactaatgtcaccgcttacatagccatccatcacatcaccgctgtgagtatattttatatcaacatctttatattttgttgattcaacatgaacgtcaacagcagacggtgtaaaactaactatatcaccgaattctgaactaacactaaggttaacagttataactccttcgcttgtcagcttagacgcattgacatcagaaaaatccagtttagcaataatattactgctgtcaaatttagcaataacttttcggctgccctcaatttttacagacgaggtttgcacggaaagtttctcaatagaataaccatgatcactgattacctgctcgtttacggtagtaatcggaacatctctaaacgtcttttcggtaggcgcatcaataattataattatataagcccaaagcacaatggcaataataaatgataatattttcaggagagtattgttagcaaaaattttattcaaggctacctctcctttcttgtaaaaatatttttaaacattccgggattctgctttttagaataacttccaagcaattcttcaagtctgctcttcatagtttcttcgttcaaacctctggtcagcaatcctttataagcgattgaaatatttcctgtctcctcagaaacaatgactactattacatccgcttcctcagaaattccaataccggcacggtgtcttgttccaagttcagatgttatatgcggattttgtgaaagcggcaagacgcatgttgcaagagctattctgttgtctcttattataacggcaccgtcatgcagaggcgtgttatgaacaaaaatatttattaaaagttcagatgaaacctcagcgtcaattttaatacctgagcttatcatagaatctatatcagaaccatgttcaattactataagtgctcccgtcttgtcatttgacatagcttgtgcagcatgtgacacttctcttatcatactcaaaacgtttgtatcgctctcagaatcatttgaaaaccaaccgctgattgatgttttacctacttggtcaagagcacgcctaagttcaggctgaaatataaccactaatgcaataacgccaatctgtgcacatttactaaagatatacgaggtaacatgaagattaaatagataaaccacttgaatgcctacgataataagaataacacctttaagcagacgtgttgtatggctgtctctgataaactttagtaaaatatataccaaaacagcgacaattacaatatctaccgcatcggcaattctaagcaaagaaatctggtctaatgccgagctaaagaaatttgctaacacagaattacctccgtttctgcctgcaaaaactgcagacaaaataatttttaatatgccttaccccaatacaccatatgtttagccggtttcccacaacaaatacacacgtcactaagtttttcctgttcaaatggtatgcagcgtgatgtagctgtagtatcctcttttattttaagctcgcattcttcgtcaccgcaccacatagctttaacaaagccgcctttttctgctataatatttttaaactcatcataagtaacagcagaactcgttttgctttctctattttcgagagcggcgtcaaacatttgctgctgtatcttatcaagcagattttgtaattctgtttcaacattatccagcgaaacaaaagttttttctctgttaacccgattaactaaaacaacctgattattttctatatctttaggtcccatctctattctgataggaacacctctcatctcatattcactgaacttccatccaggagacttatcactgtcatcaaactcaactctaaaacttttcttcaaacgttcataaagctcagctgttttttcaagaacgccttctttatgcattgctataggaattataactgcttgtatcggtgcaattctaggtggaagttttaagcctgcatcatctccatgaaccattataatagcaccaattattcttgttgacactccccatgaagtctgatgaacatactgctgttcgttattctcgtcaaggtattgaatcccgaatgcttttgcaaatccatcgccaaagttatgactggttcctgactgcaaagctttaccatcatgcatcatactttcaattgtaaatgtttcggtagcaccggcaaacttttcccgttcagttttctgtcctttaattaccggaattgctaattctttttcacaaatatctgcatagatattgagcatcattctagtacgctcttccgcttctgcttgtgtggcatgcgcggtatgaccctcttgccataaaaattctgtgcttctcaaaaacggccttgtagttttctcccatcttactacactgcaccactgattatacaattttggcaaatctctatatgaacgtatcacatttgaataatggtcacaaaacaaagtttccgatgtcggtcttacgcacaaacgttcaggcagttcttcatttccgccatgtgtgacccaagcaacttctggagcaaatccctcaacatgatccttctcacgctgcaaaaggctttcgggaataaacataggcatagacacattttgaactcccgtttctttaaacctcttatccattattttctgaatattttcccatatagcatatccgtaaggctgaataaccatgcatcctctgactcctgaataactgcatagttccgcctttttaataatatcagtataccactgagcaaaatcttcgctcattgaagttatttcttcaaccattttcttttcttttgccaaaattaccagtccttccaaacaatatattaggtcaaaatatctcatttaaaactttctgtataaatagtttttaaataattttttacaatttaatttctaaatgagcatactactatttagtataaatgaaaacgatatttgtgtcaaggctggtcaagaattttaatattacaataatgttaccataagctattagtcactttattattatcagttaatattggcattaaattataactcaccaaaaatgaatttatgcataaaatgcagcgaggtgattactgtgtgcggaataactggttttataaactataaaaaaattatttcagagtcggataaaaacattctgttttctatgggagaaacactcaataggcgcggtcccgatgaaaaagatgaatactgttcaaattctgtgggattagcacatagaaggctgtcagttattgatattaaaaatggtcatcagccaatgattaaagaaaataataataatacatatgtaatatgctacaacggagaactttataacactaaagaaatacgcaataagctaataaacttaggatataattttaacggtcactctgatacagaagttttattgactgcttatatagaatggggaagtgactgtgtaaaagaatttaatggaatttttgctttcgtaatatataataaattaactgattctctattttttgcccgggacggaggcggagttaagccatttttctattctaataacgattttgaatttatatttggctcagaaataaaagcactgttaaagcatccatctgtgtcttccaatgtagacaaatttggaatagctgaaatatttttaattggtcccggacgaacacccggcaaaactgcatttcacgatatcaaggaattaaaacccggatggtgcggaactttctcaaaaagtgaagggctaaatttatggcagtattggaaacttaaagcatatgaacataaagacagtttatctgatactatttacactctccgctctttaatatatgattctataaaacgacagcttgtatctgatgtacctctgtgtacatttttatctggaggattggactcaagtatcatatcggcagttgcatcagaagaatttaaaattacaaaccgcggcagacttaatacatactccgtggactatattgaaaacgaaaaatattttgagaataattactaccagccatcaaacgataattattatataaatttaatgagtaattttatagaatcaaaacacaacaatattattttggataacgatttagttggcaacgcactgctggacgcaactctagcccgcgaccttccaggaatggcggacattgagtcctcactgttattattctgcagtgaagtgaagaaaaaccatactgttgtattgtcaggagaatgtgccgatgaaattttcggcggttatccatggtttacaaacgaagaaatgctggcacaggccgatttcccttggagcggaaatacagaaataaaagccaatttaattcaggacaaatatttgcaatttgacccaaaagaatacgtgtttaaacgatataaagatacaatagattcagcgcctaaaactggaagtgaaactccatctgactcaagaataaaagaaattaccatgcttaacataagttggtttatgcagactttgctgtcacgcaaagaccatgcgtctatgtatagcggtcttgaggtcagagtaccattttgcgaccttagaataattgaatacgcatacaatattccatgggatatgaaaggttatgcagggcgtgaaaaaggtattttacgcaaagctttcagcgatatgctgcctgacgaaattgtatatcgaaagaaaagtccatacccaaaaagctttaatccggcatatacaagaaatgttgaaaataaaataaataaaattcttttaaattatgactcacctattttagaaatagtaaagccggataaactccaggaactgctggacacaaaagctagtatgttttcaaagccttggtatgggcagctaatgaactatccgcagatattagcatatttatatatgataaatacttggcttgataaatatgcaattaacataatataacgatatctaaataaaaaatagactaatataaaaaaataccaaaacgttatgttttggtatttataatttttattcatccttttttatactatccacatcttttaccaccctatgacttgtcggaacccatttcacatctttaaccatagcaacaaaggcaattggcagatatgtaagcatatataacgggaaagtaaatacataaagtatcttcttagctctggaagtatatattcttttacgctcagttatagctgttactccacccataaagaaaaatatccaatatacattaaataacgtaaatcctaaagaaaataatacaccgggcatttcaggcgaccttatcacagcggcaaaaatcaatgcgaatatattaaaaattaaacctataaccatcattagtattgccggcgcaacagacataaacatatcaaaacaagcaaaactgcccttaaatgttctctttaacaaggtaccgccatacttagctaaaatctgatagtaacctctaacccagcgcatcctttggataaaagactgctttaactctgtaggctgttcatcatagaataccgcgtcatttgcatatccgattttaacacctttcaaaacttcactaacagtaaattctgtatcttcgctaagaaggtgacatctccatccgccttcggtttcaacaatttttttgcttattaaaaaacctgtccctgtcacagcgcagggtgtatttaataacattctgggataattcatatatttagcgtctctcaaaaaatatagcgcattaccggcagatacccaatttgttccgtaatttttggaatttcgatagcttgttacaacatcatatccattatcaaaaactttattcatttcaagcaaataatctttgtccagaacattatcagcatcaagaattataaaaccatcataatcttcttcattaagcttgtccgaggcagtttcaaaaaaccagtcaagcgcaaatcctttaccaactttaagattgtcatttctttcataaactgtcgctccggcttttctagccgcttcagcagtattatctgtgcaattgtcggctataacgtatacgcctattttttctgaaggatagttttgtgctaaagcgctcagcactagttctccaacaacgatactctcatcccttgcaggtataacaaaagcatatttatgttcggttttagcaacaaattttttttgtttcttaaataaagcaactactaaataaaaaaactgataagcgtaacaaattgtaaaaataactgatataagtaaattaattataaaaataactttcatattcggctccattccactacaattagaaaggagaggcaacagaaacacctctcctaatgtgtatagtcgaaatattttagatcacattacgcggcttcattacttctaacctcatctaatgttctaacaacgctatgtttgataggcttccactctactttcttaaacaatgctattatagcaatcggcacatatgaaagcataaataccgggaatgtaaataagtataacacttttttataccaaacacaatgaatttgatcccattctgtgattgcagtcaaaagaccaagtataaagaataacccataaaaatttacaagagtttgaataagcgcctgcacaagaatagctgtctccggagcatcagtagcaattgctaccggtatagctacaacatttataagtacgctcaatagtgtaagcagcatcgcgggcataactgtcataaacatatctagacaagaaaaactgcctttcaaaacaccttttaacaacttgccgccataattagcaaaaacttgatagaaaccttttgcccagcgcaaacgctgcgtgtatgactgactgaattttgtaggctgttcatcatataaaacggctttggatgcataaccaatcttcattcctttactaaccgaatcacaagtaaactcaatatcctctgtgagcaaatgatgtatccatccaccgttttcttcaataacatttgcgccaaccaagaatcctgttcctgaaatcgcacaacttgttcccaactgcattctagaattatttaaatatcttgcttctctaaggaaccataaagagtatgctgctgaaatccaattactgtcaaaattcttagagttacgataacttgtaagtatatcatatccattatcaaaaaccttgttcatttcagacacatagttaacgtctaatatgttatcagcatcaaaaatcatatagccttcatatcccgcatctttatggtctcgatctattatcttaaacaaccaatccaaggcatatcctttaccaacctgaactttgttgaatctttcatacacaattgcccctgcttctctggcaacttgtgctgtatcatcagtacaattatcagcaataacaaagacgtcaagcttatccttaggataattctgtgatttaatactcgaaattaactgtcctattacgtctctttcatttctggcagatataacagcggcaaatttatgctcacggacagctttaaacttttgttcacccttaagaagcccaacaaataaataaaaaaattgataagcataacaaagtgtaaacaaaatagatattacagcattaaaaattataatagctttcataaataatccccttttaaattcaaagaattaaaattcacagaataaaattttcagcttaataaaaataataaaacttttacaagcctttctcatatactatattaatttatattcttaaaatataaacaaatcataaacaaatagtaaatttttcataaacgatatgttattttaccttttcactcgaaacccgtcataaatcattctctttttagtcaaaactaacaatgaaaattgataaattttgtatacaatttactaatatccaactttgtatccaaatagatttcatctgctaaaattgcttgacaaataagcataccatatccattcattattttatttccatttttttcagcatattttaaaaatgcagttttatcaggattataaattagatcaacagcaagcgcctctttattgagtttatctaaaaatgataaatctgtataatcatatggtatttcgttcattcctaatggtgttgcatttataatcatatcacaatcatcaagataatttttaacatttttcgaattagaactatcaaatttaagtgaagtaactttatttattgacccattatcttgagctgacatgactctcatacaaatagcttcagctttctgtacagttctgtttaaaataattactttagaagcctcaagctgtgaaaacttcagtgccagcgttgatacaacaccgcctgctcctaaaattataatttttcttccttttacattaaattcattttgccctaagttcaaagaagttataaaaccgtttgcatcagtattatatccatataatttattatcttttattttcacagtattaacggcgccaaacaattccgcttcactgtcaattccatctaggtatggaattatgtcaactttatgcggcattgtcaagttaaatccggttacattattttttattgcattttctatatatttatctagttcatttttcttaactttaactttttcatattcataaggaatttttaaaagatttaatattttgccatgaacctcaggggatttactatgttcaatagggtctccgattacattaagcttaattgtcatcttcttccctcatttcattaagcaaataatctatagctaaaagataacctctgattcccaatccacaaatttgtcctatacatccggacgcagtaacagattttttcctaaaatcgtcacgcttatgtatgttgcttatatgaacctccactgcaggtaaatttacagctttaagcgcgtctaatatagcataactataatgcgtatatgcccccggattaattactattgcgtcacagcttcccaatgcatggtgaataaagtcgattatttctccttccccattactttgaagaacgatagcctcggcgcctaaatttttagcgtattcttcaattgtgttttccaaatctgaatatgccgtatttccatacacatccggttccctgacgccaagcatatttatattaggaccgtttattaccattattttcataaccctatttcccctttcatatatattcgtgatatataaaaaaatactatattatttatcagataaagtttttatatgattaattatttcttttaaaacctcagcaaaagacttattatttgttattatatagtcagccgcatctctatataattcatacctctcactatacaaagaaattaatttgtcagctccgtctttaagcagcggtctgtcagatgtatcaacatcttccattataaaatccaagggtctgtcaataaatataatatacccacccaaaaattttgcattttctatattaatattattttttactacgcctccgccggttgaaataataatattcttattttgcggaactgaacaaaactttttaagcttctctgtttctaatctgcgaaaatattcttctccgttttcagtaaaaatatcatttattgatttattctgacttttttcaatttcttcgtctaaatcaacaaaactaaagtctaagctctttgcggcacgttttcctaaagatgtttttccgcacccgggcattccaataagcaatattttcaaattcatcacctgctattccttaattttataattacctaaaagcttaaactcaccagtgccttcaattacattatttgtaatttgccttaccttttcatctaaaagatttccagtataatcaacaaagaacatatactcaaaatttttattatcaagaggtctagattcaagttttaataaatttaaatctccatgcgcaaaacatgccaatactctatgtaactcgccgctttcgtgaggaagtgtaaaagccgcgctgattttattgcacgtttcgtctacttcagaattaactgataccacaataaaacgggtagtatttttatcactgttatttatatcttccgctaaaatatccaaaccatatatctcagcattctgcttacccgcaattgccgcttgaaccggattattatcattagcaactttctctgcacttttagccgtgctatagtattcacggcaaataatatcattgcctaaagtttttaaaaatccactgctctgcattatcccctgttcatgagaatagatatactttatatctgaaactttcgaacctttaacacccataagacaatgtcttataggtatatcaacttcacctattataaaataaccatatttttcaagcagatccattacatcaactatggtaccggtgttagaattttcaataggtaaaacagcataatcagatttattattctttaaggataaaaacgctgcttcaaacgaatcagcattagttctgtttgattctgctccaaaatattttattgccgcttcctcgctatatgagcctttaacaccataaaatacaatcctgggattttgaatatgtggtttaggatttaacatatcctcaatacgttttcttcctttatcgcggctaagttcacgagtctgtctatcacggcttattgacattatagcagtaaaaaactcataaacttcattttctcggcttttgtctgttaacaaatccattttgctttttaaaacttgcttttctctttctgaatcaagaaccggctttcctacacttcgcttgtaatcagcaacactgctgcataaatccattctttttaaaaataacggcagtaattctttatcaatcttatcaatatcttctcttagtatgtctaacctatttttttggctgcatgtattatttaattcattcaatttttgattatcaattttagtgtccattttatcttcctttaagttacaatttatctatctaataaaatatccaaaatagccaatgctacagcattctctataacaacagcgcccctgtgaacgatacaaggatcatgtcttccatgtatttctatagctgagttttccattcttgatatatctactgttcgttgtttttgtgcaatcgaaggcgtcggttttaaaacagcctgcattattatcggcataccattagtaataccgccatttataccggcattattgtttgtaaatgttttaacatcctttccttccatataaaattcatcatttgcctcatcaccaaacattccggcaaaatcaaaaccggcgccaaactgtacgccctttactgccggaactgaaaacagcatagatgaaaggcggctttccacggaaccaaaaaaaggcgcccccttaccaacaggcataccaataacagcacattctactattccgccaacagagtttaaattttctttagcctcaagtatttttgccttcatttgttcagttttactgtcatctataactggaaaatctttttttgtaatcaactcaatatcattttttgatactgaaataggattaaacttttcatcagcaacatcattaattctataaatatgcgcgccaacataaacattatataagcttaaaacctgtttggctatggcgccggcaaaaaccaacggcgctgttatccttccggaaaaatggcctccgccgcggtaatcatgactttctccatacttcataaaacctgtaaaatcagcatgtcccggtcttattaaatctttttcataatgttttgaaatcgtatttgtattcctgattataccgcaaagcggggtacctgttgttttttcatcaaaaaaaccagatagtatttcaacattatcttcctcacgtcttgatgttgaaatattatcctttccgggagcacgtcttctcatttcatctgaaattttttctatatccaaacttattcctgatggaagaccatctataactatacctataccgccgccgtgcgattctccaaaaatactaagcttaagattgtttccccatgtgttcaatgcaagtgttcctccttagtaagtttcgtttcctgccagacgatcatacaccttataaaaatcaggataagatttggttacagctttttctgcgcccgttatctctatacacccctcagcgcggcaagcagcaatagaaagcgccatagctatacgatgatcgttccaggaagaacaaacatttccctcaaccaaatctctgcctattatttttaaaccgtctctttcctctacaatgtcaactcccagcctgccaagttcggttgcggttgaccttaatctgtcgctctccttgtgtcttaatcttccggcgtttattatccggctttctcctgagcaaaaagagcaaagcaccgcgacaataggtactaaatccggaatatttttggcgtcaaccgttatcccatgcattacagctgtctttttagccataattccgccgtttggcccctttacaattcttgcaccggtatttttaattatatctaaaatttctcggtctccctgcaaactattagaattcaaattcaaacattcaacattacagccgattgcgtcagctacaagaaaaaatgctgcctgagaataatccgcctcaatttttaattcattgcagcctttatatttctgaccgccttttattttaaacagcttatacttataattttcaatttcaattccaaattttgaaagcatatcaatagtcaaatccacataaccttttgattcaagctctccggacacaataatttcactgtctccgtctataatcggcaaagcaaatagaagtccagttataaattgggagctgacatttccaggaagaccatagctccctgattttaaacttccatcaataattatataatcagttcccagttcatactttatacctttttcgcgaaagatgtttaaatatggagtttgtggtctctgcataaggcggccgtgacctacaaattttaccggaacgccttttccaagcgcaataggcatcaaaaaacgcaaagtagaaccgctttctccgcaatcaagagtaatcatattcttaaccttatatgtttttttcttcgtaacgctcactgtcatactttttgtattgacgctgcatttagcgcccagtgcgcgcatacattcaattgttgcttcgatatcctttgaaactgcaacattttcaattgtacactccccgccagaaagagatgccgcgattatagctctgtgcgcgacgcttttggacggcggaactgaaacaattccttttaacatattaggttgaattttttttacatcttccatctttcagcctccagctctatttgtcatttaataaaaaaatgttaaatattatttaagaaagtcgcttttttcaagcttttttatcattaccttgcctatgtcctcaattaatattaaattaattttactgccttcgccttttttatcaactgcgacagcttctgcaagttcatctttgctgatttgaacatcaacaggaaggttataatttttaagaatgcttatcattctgtctgtaacgccgttatgtgttataccaagtttttcaccatattcacaagccatgaccattcctacagccacaccttctccatgagtatatgtttcatagttatattttttctcaatcgcatgtccaaaagtatgtccaaaatttaaaatcatacgtccgcctgtatcaaactcatctgattcaacaacctgcctctttatatcacaacaattatatattattttatcgatatttgcaaacaattcttttgtagattttatactttcaagcatttcaaacagctttttatcttttatagcaccatatttgattacttctgccataccgtctgccaaaactctggaggttaatgttttgaggcagtctgtatctattatcaccatctccggctgtttaaaagctccaaccaggttttttccacgaggcaagtcaattgcaaccttaccgcccacactcgaatctacctgagccaataaagtcgtaggaatttgaacataaggtattcccctaagtaaagtagcagcggcataaccggtcaaatcaccaattacacctcctccgagagcaattattaaatcagtcctggtaagcttaaaatcaagcatttcattatacaaattcattaagcaatcagcagatttgcttttttccccagcaggaactgttataagtttggtttcaaaacctgactgtgcaagacttgaaacaactatttctgaatatagcggagctacgtttgaatctgtcacaacagcaatcttttctccggaataaatttttcttatataatatgctgtgttgtttaaaataccattatcaatgtatatttcatactctcttccgggaatatttactcttaatttttccatggctcaggctccttttcctgcatagttattttatttttacacactttatcaagtaattcatataattcatcactttgtgaattgtcaatacaatacctaatttccgataagttttcaattaagcggtctatttcatttaaaacattttttctgtttgctaaaaacaattcactccaaagcttgggatttattcttgccactctagtgcagtcacgaaaagaaccggctgtatacgctctattcattttttccggataagataaacatagagctgatgctgctatgtgcattaaatcgcttgtataggctatcacactgtcatgctcttcaggatttgctatggtgatacgtgtggaaccaatatatttagctatttcccttatcagttccacactttctttttttgaagttttaacgggagttattatataaccgctcatccaaaaaagctcagatgatgcgttagcaaacccctccacctctttgcctgccattggatgaccgcctacatagtcgacccccttaggcaaaacgctgcatatggattcagaaacactggatttaacaccgcaaacatcggatataactgctccggtcttgaaccggtgtgcgttaatttctataattttatgaatactgtccggatatgtacaaaaaaacacaacatcagagttttctatagcatctccggcttcttcatatataaaattaacagctttattttttaaagcgagacgtctggtttcgctatctatatcacaacctgcaatcacgcattttttaaatcctttgagggcatatgctaatgaaccgccgataagccccaatccgataattgcaatcctaaattccttctccatatctctactcctattttatattttctttccaacatgaactccgattgccttcattttgttcatcatattttcaaactgttttttatcaagagactgtgcgccgtcacaccatgctttctcagggcaattatgaacttcaactataagaccgtcagcaccgactgtcatcgccgccaaagaaagcggctcaaccatccaactcatcccggctgaatgagacgggtcaacaataaccggaaggtggcttaatctcttaattgcaggaatggcgcttaaatccaaagtgtttctggtatatgtttcaaatgtccttattcctctctcacataatacaacattgggattaccggaagccaaaatatattcagccgacatcagccattcttcaattgttgatgaaagacctcgttttaataaaaccggtttttttgtattgcctaattctttaagcaagtcaaaattctgcatatttcttgctccaacctgaattaaatcaacatccttatcaaatatttccaccattttaggcgacataatttcagtaacaatcggaagtccggtcttttcttttgcttctttcaataacttcaaaccctcaagttcaagtccctggaacgaatacggcgacgttctgggtttaaaagctcctcctctcagcattttagcgccgctctttttaacgctctgtgccacatcaataatctgtgcctcggattccacgctgcaagggcctgcgataacagtaaactcgccttctttgcctatttcaacattatctactttaataacggatggatccggatggaactttctgctcgcctttttaaaaggttcagcaatacgcataactctgtcaacatgaacattcagcatcagagtatcaggatctattttgctcgtatctccaagcaaacctaaaactgtgcagtcaacacctttgttaaccatcacgtcaagccccatatcctttatataagacaccattttattgacatcttcctgttttgtttttggttttaaaataactaccatttttattcctcctaaatttgttataaaaataaaaaggatgagccataagcccatccttgaataattttcaaagttttatgttattatcttaaaaagaacataaacgggctttactaaatttactgcaccaaaaataaccaaagctaaagtaaaagctctggctaaagtagaaaaaatattctgttgtatcagaaatcaatctacgcagcaaatcactcattttattcttctccaaataacaaattaaattaaaaacacttgcaaattttaacttcttagtattatactacatactttgttaaaatgcaagtgtttttttaaactttttatattttttctgttacatgcctggtaacatggcagtttatgttaaccgcacaaggcattccggcaatatgtgtaggaaaagtttcaacatttattccgagtgcagttgtgacgccgccaaatccctgaggtccaatatctaaccggtttattttttccaataaaatattttctaaatcagcataatacggatcaggatttttgctgtccacatcacgaagaagcgcatattttgcaaggtatgcagccttttcaaaggttcctccaatacctacgcctataacaagcggagggcatggattgcctccggcattttttactgtatcaacaacaaagtcaattataccttcaagtccgtctgatggtttaagcatttttaccgcgctcatattttcactgccaaaacctttcggggcaatagttatctcaatattatcaccttcaacaatttctgtatgaattattgcgggagtattatctccagtgttaccgcgtcttacagggtcagcaacaactgattttctaagataaccgtttttatatcctctcctaacgccttcatttactgcatcacacaataaaccgccggaaatatgaacatcctgtcctatttttagaaatacaaccgccatcccggtgtcctgacaaataggaactgcttcatcacgagctatttcagcattctttataatgttattcagaacatcttttgcaactgtattagtctctttctcatatcccctgcgtattgcattttctacatcaggattcaaaaaacaatttgcgtctatacacattttttcaatagtttttgttatcaaatctgtattaatctctctcactgtatcaccattctttttttatataattaatttcccctattgtggaaaacccatgaattcagccactttaaccatatattagagtaatctttagttacagtcatgcctgacagcacaggatagaatccgacaaagagcaatccacacaatgcaacaaagcagtttgaaatatgcttaaaccagccaaaacgttcttctaaatcacggagagtataaactatcatgattattaggaatggcgtacttgcaaagaaatgatatataaatacacatctggtaacgaatacccaaggcaatatttgagcaagcaatccaacaactaaaaatagaacttttttatctctcttaattattccaacgataactgtatatataaaagcaactatactggaccagaagatcaatggattaccaaaaatggagatacatccaatattgttctgtcctaccgtctctacaggtgccgaataagcccataaaggacggtaatctatcggccactgataccatgctgacgaatacggatgtgttgcctcaagtccgctgtggtaattatacatataagtctgattattcagcattgcatgccaaacatccggatatcctttaaccatcgaaatcggcagatatgacatagtgtatataaatcctggaataagaacaaaagttactacacatgaagcacatatcttaaataagaatccaaggaataatttcttgtgttttttaggcaaagccatatatacgccaacaaaaatcagaagcaactctacagcaagtcctgcccctgcatatatacaaatccattttgacgcagcgccaaagccaaacattaatcctgataaagctaaagttccgattagcttccaaatagtttttccctctttaagcttagttggattattttttgcaaggtcaagcgccctctttccaaacaagaacataaacaaatacatcgctattataaatgttactggatacgagtctatcgttcccattctagttagagcaaaatgcataaagtcaaacgcaaatatcaacgttcccaaaacggaatatctagttctctcaaataattttttaagtaatatatataagagaggcagcattataattccgaaagtggttcccataactctccagccaaacggcgtcataccaaaaacagcaataccgattgacataattaatttaccaagtggcggatgggttgtctcataatacggcattaaatgaagatgctcatacgcagtacgcggatgatatatttcatcaaaataggtgctgttcataaaacttgttctatattgcgccatatcctgctcatccgcaatatttgcacaatcaccttttccggttacgtttgatatcggaatttgtgttccgtcagcctgccaaaaagcaagttcaaacattctgtagtctatagcactggtctcaccttttacatacctggcttcaacaggagaggcaagttttgacacttcccatttaaaaacagaattaagctgacagtttacattcatgtcctgccatgttcttccatccttagaatatgatagcttcatccccggctttgtagcaacatcgcctattcccaaataataagttacagtatcaatgctttgaactgaacccaaatcaatctgaaccgtttcatttggagactcaggctgataaaacgtctgcggattttttaaacttcccaaatttacgtatgcgataatagcgtaaataataacaattgccgacattattactatatcagttttaactatcttttccgtttttaatggtttgcccgtatactcaatttttgttgctttataaaataaagatgtaactttagatagaatttcaaaatactttactttaattttagaaatccatgtatcaagaggtggaatactttctgattcctcctcacatatttccacattcaattcagcactatcaacaactctacttgaaacattaactttatttttgccgaatgaagtaaaaaatacctttacagcttcaaagccatgatatttactttctccaatatctccagccctagcacaagtcacctgaggatataaaacgtaatcatgtatgataacgaacatggtaattataaaagtaacaacttctaatactgaagcgaacgccattgcttgatatgatggtcctgaagtattaaatttcagcataaacatcaacacacagaaaacatttataaagttaacactgctaaaaaacgcaaaactaaataacgttctcttatttttcgataacatatattcaaaaattaaaaacataattggcgttattaaataacgttcgtgcatttttaatccaaacgtaaacaaaaaactgattatgaagaatgcaggtataaatatctttccgcttggacatttaattttaatatatagtatcaatgctccgccaatagctaaaagtatcataacataattcagaatattgagaagtgtttgggctgagccgccgacttcaagagaaacccaatttaattttagcattgcaaagaaattaaaagcgtttattgtaaaatatggatatgaagctaatgtactcatatatttttgtataagccaaaccggattaagtgatactaataatttttgccctatattcaatccttcctgtccccaagccgcatagttatatggaattgagaacataagaagcattataactcctattacaaccatctttaatatcattttccaatcctttgatgcaacaaaggcaaacaaaaataccggtccgaccatcaaggcctgaggcttcatgagaacagcaagcacatataatatgccggataaataataattcttcttatacaaattatacattgaaagtattaaaaatactgccagtacagattcaacttgtccccaagcagatgaattaataaacagaagcgggttcagcattaaaattattcccaaaatcaatgcagactttttgcccatgtgttttgaaccaataacaaaaacagaaatcatcaatacggtgtcagccaaaatagccggaagtttaaacatcagctgtgttgcatttccggaaagatgaaaaatctgattaaaccatgcaaaaattccgagtattgttatatatcctggcggataatcgcaaaaatactcaggagcataaaaatgtcccggcccatttgtcatcacgttatttccccatgctatccagcatgacatatccgacggatatccctttaaaaaataagccaatattattctagacaacaatgcaacagcgccaacaataacaaaaatacgtatagataaatcaccaatatttttgttatttttcagttgctttgccggtacaaatttctctttagatttttttctttggtttctactttttgatttatttttgttcacttccatcaaaggttgaactgataattgattcttagaatcaacaaatttttgcagagccacaaaagctaaaataaaaagtattgcaattaaataggctaaatacacttcctctacccctttttctatatattctttaattgtttactaaaaataatatgttgtttgaaataaacagttgttattccaactcagtatttataacatcaggaaccagagttggcagcggaacatcattatcatccgagccgttaccattactgtaagaagaatattctacataatctgatctccatgtctgaccaagcatctgccttaaatcttcctgctgtatagtgtatggataactcaaaacaagtaaatcatcaaaattatacatatcataaaattctttaactgtaaaggtattataattttcaccattattattaaatattctgtaatcaactatatacacattttcataattatttaaaagccatgttgaaaaagcatttccaaaagactctttaataatacagattgatttgccattatcaacgttagtatgataatattcaagtggattatcaccctcaagaaaaatagcatagcttccaaaagccggattaataagctgcatattttttgtaggtttgtccatttccatttcactatatgactgtccttcaaattctaccttaggcatataaaactcaattatatcacggctgctgtccagcatattatatccatcagtatctacagtaactttaccccaagaaccaagataattatttatagttcttttttcaaattcatccagctcagaagccatattatccgaaacactgcaaaattcacgataagcaaaatatgaacccaaatgcgtccaatgatgatccgtcttaaaatatatgtacttatcggcatttgacatcatagcgttttcaatattaataggcgtaacatttgagtttaaactattatatatgtgtgaaatagctgaaagataatttgttctaaaaccaaaaggcgcataaaactccgccgcagtgggaacaactccgcaaaatactctgacatcaggcaaatcttctgccattccattcaatatctcagcatatttttctccgctttttttggaaattccaagcagttccataccaaaataatcagttccgtttttataaaaaatagaaactccgttatactgtccatcgtaattttcataacgatattcatcacttattattgttccattcatcactttatttgactcaggcaaatttctaatacaaactattctatttatatcgtcccaggtcacttcgctgccgaaagattcagaaattgctcttaccggaaccaatgttctgtctccttcaatcatgggagccgcatccaaatgtataacttttccatttctaaacatctcattattgtcaatctgcaatataatctcgatatcatccaatttagaagttattatctcagttccctcgtcccatgatacctctgctccataagcttcaaacacagttcttaatggaaccattgttcttgaatttactataataggattttgatcaaatttcaaaaatgtcccatcaaaattaactgaaatatcaccgctggaagcggcagccgataaacttccaataataaatattaatatcgcaattaatataatagtcttacagaataatttttttacatcaattatagttatcaaaaaatcaccaaatttcaattttttcatctaatttatcttgccatattctcaagtgcatttaattcaggttcgttttcaacagaaacaggataatttattattactaaatcatcaaatttcacattatcatagaaatcgcttataaaaaactcccggctgttttcaatgttgccgccatacctgttaaactttctataatcaacaacatacacttcctgatagttattaagcgcccatactgcaaacgcgtttccaaaggattctttcacaatacatatttttttgccattatttatagaagtcttaaaaacttctataggataatctccttccagcagacaatcataattttcaaaccctggatttatccctttcatctcctcaatgtactgagtcaaattaacatcataataagacgctcctgtatagttgcctactggataatagagagttaatttatcatatgtatctttcattaaatcatatccgtctgttcctgataagtaaccaagaaaagaaccttgataattatctatagtttgatttgcaaacatttccggctcatcgatatatccgccgctataacttaaaaattctttataagcataatatgcgccaagctgcgtccaatggtggtctgttttaaaaaatatattttcattggcatgtttcattaaaacgtcctcaacgttaattggcgtcacatcatcatgcaatccatcatatatactggctatttcatttaaatagctggacttttttgcatcagaagcataaaactcagaagcggtcgggatgacaatactatatgtattagcttcaggtacagcatcagcaaaattattcactatatttgaatatctattgcaattctcatcactaatatctaatatttccatacaaaaatgattttcaccgttgctgaaaacgtcaaacccgttatatgaaccattataattctgatatctgtattcatcacttataacagtcccgtccatagggttttgctttctgcctttatcaatatgtacagtcatattctgggaatcccaagaaacatgataccccattgtgcttcctacagcacgaataggtataaacatctctgaattttcaagtattggctctgagccaatattaacttctctggaattgaccgttatatcactgctataaacactcagaacataagtatttccattatttttaacagtcaatttatttttatcttctgaataataaatatcaagacccagtatatcaaaaatttctgaagccggcaaaaaaactctcccgctttttataattggttcacagttagaaaattcaactctatttccatatacatatacagatacctcctgtttgatagctaaaacatcacctgcaaacaacacgctcatcatggataacaataaaataagcgccgaatataatctgattttaaccgaatatttcaaaaatactctgctcctttaccatttaacatatttgagttattatatcatacttatatttccaatgcaatatttctaaataaaatttttgtattattttattgaaaaaatatattataaatataaaattactttataattacattacataaaaaagccttgcatttttgtataaagtgatttaaaatgagtttttgtgataatacgaccaaatttctgcaaaggggttatgattatgaaagtcctaatggcaacaatgaaactagatattggcggggcagaaactcacattgtcgaactttccaaagcgttaaaacgccgcggtattgatgtctatgtagcttcagccggaggtgcatatgaaaaagaactgacagacgccgggataaaacacttttatgtgcctatgtcagacaaaaatccaaaagatgtaataaccgcatataaaactttaaaaaatatcataattgattataaaattgatgtggttcacgggcacgcaagaataccttgtttcatattaaatcttatcagaaaatcaattaattttagattcgtcacaacagctcattgggttttcagtttaaaattcccatataaatatataaccaaatggggtgaccgctcgctagctgtaagtgatgatataaaaaaatatcttattgataattatggtataaaaccgggaaatataagagtaacaatcaatggtatagatactcagaaattttcaaaaaatactgattatactgaagttgcagaagaatttggactaacgccggaaaaacgcaggatagtatatgtcagcaggatggatattgatagaagtcttgctgctcataaacttatttctattgcagaaaaacttgatgaaaagatagataatcttgaaattctaatagttggcggcggtaatgactttgaaaatatgaaaactgctgctgataatgtaaataacaaattaaataaacctttaatcaaatatactggaagcagaaccgacataaataagctggttgccagcggcgaaatatttataggcgtcagccgtgcggctcttgaagccatggccgcggaaaaaccgtctataatcgcaggaaatgaaggatatatcggtatatttgaccaagataaactaggtatttctattgatactaatttttgctgcagaggctgccgtgaaactgatgaaaatatattatatgaagatattataaagcttatgggccttcctgaagcagaaaaaacaagattaggaagctattcaaaagaagttatcgaaaaatattattctatagatactatggctgatgacgcaatgaaaatgtatgtcagcataattaaaagtgaaggtataaacgatgttactaatgatgaatttgaagacattgatgaatatatttttcccttgcgcaaaaataaaacttatgatgttatgatatcaggttactatggctttgacaacagtggtgatgattcaatattaaaagccattgtgaacaatcttaaagaactaaaacccgatataaaaatactggcattgtcaaataaccccaaacagactaaagctgtttatggtgtggattcgattcataggtttaattttcctaagatttatttaaaattaaaaaacacatcattactaattagcggcggcggaagtttgattcaagatatcaccagcgacaaatctttggcatattatctcactataataagacttgcccaaaaatgcggcacaaaagttatgctgtattctaatggaataggacctatacaaaacaaacacaattacgctaagataaagaatactcttgataaggttgaattaattactttacgcgaagattcttctaaaaaggaacttgaaaaaataggagttaataactcaaatataattataacagcagaccctgcttttacgctaaaacccactactgatgaaacaactgataatatcttattaaaaatggggctaaaagaagattcagaattcgtatgtatatctgtacgtccttggaaaacaatcggcaattcttttgaaaaaactattgcagcaactgctgattatataaaagaaaaatatggcattgacagtgtatttgttccaatgcagtgtcctaaggacgttgatatttcaaaaagaatttcttcccttgccacaaaaacaggctatatagcgcctgaaaatttgacgccgcctgaaattttagggcttactgcacggtccaaaattgttataggaatgcgtctgcacacgcttatatatgcagccgctacttgcactccaataattggattaatatatgatccgaaaataaatgctataatggattatattgaccaaaaatacagtatttctgtagataaccttaatcctgtcacgataaccaggtatatagatgaacttattttatctcatgacgatattgtagctgatttaaaaaatacaaccgcattagctaaagagaaagctcttgatactgctaaactcgcagtagatttaattaaaaacgaggactaaatataatatacagctagaattatgtattatgtctatttttatataacttaggcatgtattagaattatttttaaaacgaaataattttgtcaatttcaaacagcaagcatatatttgagttaattacttaatatattcacagtaaaatataaaggaaggtaactatatgaatttatttatattcaataatttgaataatgatgatgttgtaacttcattatttaaatttaaaagcgatggagatgaagatgcgtattatcaggcggcacgtaatttgatctccttctctaaacacaggctgacagacggaaatattattgatgaatatattttgcgtttaatgcttgaacaggacaatttacctaatcctgaaacaatacgtgactttttgcgtcaggacataaaaactgtttatgataatcttttatgtatagattgggataagctttgtatatctcaagatcttgttccaatttcttctataatttcgacacctatagaaaccggattacatggatatgcgagatctcttgaaagtatgatgaattcaaaatcacgagaggccttgatgggcgcaatacttgcacatgctgaagttttcggtaccgggagttcatcagcatttgccgcgttaaaatgggaatgtaaatcattaaaagggatttacaatacagaccctatcacatttgatgacctttgcggtcttgaatatcagaaaagaatactaatagcaaatacagaaagctttatgtgcggaaagcctgccaatgatgttctgctgaccggaagcagcggcacaggtaaatcttcatgcgttaaagctagtcttaacatgtttaaagacagaggtttaagacttattgaattaaaaaaatctgatttagatgatctgccgctagttttcagaagcataaataatcaaattttaaaatatattatttttatagatgatttatcttttgagcctgatgatatgagttataaattattaaaagttgcccttgacggtcaagcagaaaccaggggaggaaacgttctaatctacgctacttccaatagaagaaacttgattaaagaaacgtgggctgaccgcgaaggtggtatgaatgatgaaattcacaggagcgaagctctctcagaaagaaaatcattagcagcacgatttggaataaatttaagttttctaactcctacacaaaaggaatatctcaatatagtttcagacatgttaagaagagaagatattcaaatggatgagaatattcgttctaaagcattaacttggcaaatacaatataatggcttttcaggtagaacggccgctcagtttgtttcaaatttcctaagtgaacaataatatattaattataaattattaattttttataacaaatacgttttaggtgaaaattttgttgatttttgtagaaaattgtgagacaataagtatatggacaattatgaaattttaaaatagtgggtgaaagattatatgtcaaaacacaatatcaacgatgacttttcacaagataatatagataatgatgtattaaaaaacgcgtcgaaagaacttgaaaataaaaattctaaaattattagagataacgataaagaagaaaatttgaaagacaattcaaaaaataaattaaatagtaaagaagaacataaaagttctgaattttttaaagataattctaacgatgaacaaacctcatctacagatgaaaataataatttaaaatcaacggcagattctaaaaataatgatgatgaaattaaaagaagttcggttaagaacagtactataaaaacagaaaagaaaaattataaaacaataaaaattgttgccgcctctgctatttctttaatagttttagcaactgccggatatggaatatatgtcaatagctacagtaatataatgcctaatacttatattgaaaatataaatcttggaggattaacccaagaagaagctgcagaaaaattaagtcaagaatatgatcaaaatagaattcagggcaaaactttgaaatttatttgcatgggtgaccaatccactatagatattaaaaacttatctatgcagtttgaaccggaaaaaatggctagtgacgcttttcaagttggacgaacagaagccggcttttttaataaacttaaatcttatacttcaagcatattctcaggcagtaaagtaaggccagctgtatcctatgatgaacaggcgcttgccggtgcaattaatgatttatgcgccccgcatgagattgaaccgttaggttacaccttcagaatcggtgataacaacgatatagtaatcgctaaacctcaggacggtattaaggtcgatatggaatctgctatacaattggttattgaccaaatttgttcttttaactttggtgatattgaatttattccgattaagacaaaagctcctgaacttgatttggacgatttttataattatataaccaaaccggctgaagacgcgtcatacgccaaggacgataataataaagtctatgttgttccgggaaaaccgcaaatcgtcgttaataagtcggaaattaaagccgcaattgaacagcccgaagatgattacagcataccggttcaattggttaatcctgctgtagacactgaatttctgcaaagtatcctctatgaagacactttaggaacttacactaccgactatagcggaagcagcgctgccagagccggaaatataagactggcttcaaacacaatcaatggtttggaattacttccgggagaaaaatttgattttaatgatgtcgttggcaaacgttcaccggacagaggttatcagcaggcaccggtttacgtagtcaaagaaggtaaaactgtgagtgaagttgattatggcggcggaatatgccaagtatcatcaacacttttttgcgcaatcaacagagcgggtcttgacgttatagccagaacctcacactcaaaagacgtagcatacgttcctaaaggaatggatgccaccgtgtcttggggaggtccggagtttatatttaaaaacagtacaaattatcccgttagaatccttattgatgccagcggcggagttctgtctgttagagttgtaggttcaaatgtctctaaacctaagattaacttagacgttcaaaatgatggaaattctataacagttattaaaacgactaccagttcagacggcagcacaactcaagaaactatcagcagtaaaactcctccaacaaaagaaccttcaagccaaactactgcctctgcagaacctcagcaataaatttggaaaaattttaaaaaactattgaaataaattatagtatatgttataatttttaaatcaattaaaatacttcagggttgggtgcaattccctaccggtggttatagcccacgagcttatttttataagttgatttggtgaaactccaaagccgacggtaaagtccggatgaaagaagtctatattgtatcgattatttaaatacttgaatactttttttaagtattataatttattttggtactataacaccctgaaattttagggtgtttttattttgcaaataattaaaaatttatattataaaggggaattattatgactaacgaagccgtaaaaaagaaaaattcatttaaacccaaaagtgttttgtcaaaaccagttataacgacaagaatgcttgtttcaattgctttatgcagtgcgatagcatatgtgctaatgctaattgaaatcgcaatacctattgtaccaagttttgtaaagtttgatttttcagaccttccggctctcatttgtgccttcactttcggtccgcttgccggagtatttgttgaattgattaaaaatcttctgcatttattaacaacccatacaatgggtgttggagaattatcaaattttattctaggctgctgtctagttatacctgccggcattatttacaaaaaaaacagaacccgaaaaggagctttaataggcatgcttgtcggaacgatttgttttgcggcaatgggatttttctctaactactttatagttttcccgttttacataaatgcaatgggttttcctatggatgcaattatagaaatgggaactaaaatctcacctattcttgacagtgaactaaaacttatagctttatgtataactccttataatatttttaaaggcgttattatatcaatattaacatttttattatacaaacgtcttaaaccaatattaaaaggtaaggcataaaaataatgggccgcagaacaaaagctctgcggcccaaaaatcaataagaaataaatcataaaaaaatcttctgaaattattaacaagacaatttgacaaactttattttattatttgtaccttacacatcatatatatcgtcccccgaagttctaaaataaactttttaatctaaataattaagaatttcataaatcttttatattatttaaaaccattctgttatatcaaagaacaagttattgctataatccataacaaaaaccttatttaaaatatgttcaaatcgtaaatcctttaaatttccggatattttataactttcaacaaagtttggattattaattaattcaatacaatgagttttaaaagacttgctcatttccctatgaagaaactttggaagtcttgcggtcttgttatttttaataaaatccactgccaattcctcaataatgcaatctccaaaaatttcatacaaaatctcataaaatgctgtatttgccaactttcctgctttttcactgcttttgactttttcgcccagctgttcaaataaagaataaggattattatcataaggcggtttttctgaaatacttcttatactattaaagaattttccgctgttataaaacatatccacagcattttcaactttttttaatttcagaagttctgacgctgatatccattttgttgaaatcacttcatatggagggaactctgcatattttatatccgaagtaaatcgctcagatacctgtgtgccttttaagacttttaaaaatcctaactgcaacatgtcaggactcatcgaatacacaaaattaaaagatttaataaaagaattataatcttcaaatggtaatccagctatcaaatccaaatgaatatgtatattttttggctctgtcaaacgtcttatattataccttattttttctaaatcataatttctgttaactgctgtaagagcctcgtgatttatagtctgtacgccaacctcaatttgaaacatatcttttggagctgaattcaaaaccgaaatcagttcatcagttaaaatacttgcttcaatttcaaagtgaactttggtagcagttgaattttcaattatataattcactatttctactgcccgttttgaatcacaattaaaagttctgtctatcaatttaactaaaggaacctttttatcaaagaaaaatttaaatccttttttaacatattccattggaaagtatcttatcccattactatctgccgacgacagacaatatgcacatctgaatggacaccctctagaggtctcgaaatacaatattttatttttaagattttctatatccaaagttgtatacggaaacttcagactgtttaaatccacacattctccttgataaaacctattcggtcgttttccttgctgaatcagttccagcactttgccaattattatttctccttctcctctgattattgtatcaataaaattgtatttctttagaagttcatcagaattataaccgctttcagggccaccgaatataattacaatatttggcatagctttttttattaattccgcagctttcagaattatctcaatattccaaatatagcaagaaaagcagtacacatctgcaccgctttccactaatgctgaatatatagaaccaatactgtcattaattgaaaattccattagttcaggattaaattttatattatatttttctatataccttattgccaaagatgaatgagaatatctggcattaacggcaacaaaaaccgtcttcattactttttctttctccttattggaatcacttctccatccggatattcaacttcaatattttccagctgggctctgagattatatttaacatccattatatattcttttcttagctgagcacgttcctgctcttctgcttgagtaagaccattttcactttttgctttttttgccagctcatttattctttttattttcttttgctccatatatcctccattattcagagaaaccgttaggattttctttatgccatttccatgcagtttcgattattgtacctaaatcattatacttcggtttccaattcagttctttttttgctttttcagaactagcaaccagtatagccgggtcacccggtctccgttctccaagttcagcctttatatccacaccggtaacctttctagttatatctacaacttcttttacagaaaatccgtttccgtttccaagattataaatattagattttccatcggctctcatcttatcaagagcaagaatatgagcgtctgccaaatcagtaacgtgaatataatcgcgtacacaggttccatcttcggtattataatcatcgccgaatattgtaatactatctctttgtccaagtgcagcctgaagaataataggaatcaagtgcgtctcaggattatggtcttcacctatttttccgcttatatgtgcgccggcagcattaaaatagcgcagtgcagtgtattttatatcatatgcttcataacaccacttaagagccttctcgacggccaatttagtttgtccgtaaggattagtaggaatagttgggtcagtttccataattggtatattctgcggctcaccataagttgcagcagtagatgagaatacaattttatccacaccatactgtttcattttactaagcagactcaaagttgacacaacattattattataatatttaagcgggtcctcaacgctttcgcctaccaaagaatcggccgcaaactgaatgactgaatcaattgtattttccgaaaaaaccttatctaaaaaatcgctgtcacgcaaatcacctatcattaatttgccgcctaaaacagcttttttatgacctttttgaagattgtcagcaacaacaacgtcctcgcctctatcaagaagttctgaaacagtatggctgccaatatatcctgctcctccgcatactaaaactgacataatatctcctccattattagtatatattctaacttacatataaacctatttacaaatatggctatagtttataacaaataaaattgcttgtcaacagataattaaatattgtaatgctattgttgacattaatcgctaaaaatgataatataaacattattaaactatcgtattatctataactttgaggtatttttatggttaataaaaaaaatgattttaatacaataaatttgatacaaacactgatgaaacctctgtttatgtttatcatactatttatatttgcacactcatccgtttatgcttcagatgatagtcaaaaaattgaggagacagcaagatatgttctttctcaagcgactataccaacaatatcatctacatctggtgaatgggctgttattggaatatcacattcaggtctgaatgtccccgattcatactttgacagttataatgccagagtctcaaatattttggatgaaaaaaacggaaatttaggacgaaaatataccgaatattccagaatagccattgcgttaaattcaattggagctccaaccagcaatattggtgaaaaacgatttaatttattttcatatattaatgattatgataaagtaattctacaaggtataaacggacctatatttgctctcaccgctaaggtattatgcggcgacagcgatatagaaacagctcaaaaatacaaagaatttattttaaatcatcaaaattctgacggttctttcggtctttctcaaaatatgcctgacactgatattacggcaatggcaatcagtgcattgtctctgtgtaacgatagtcaagaaatagacaatgctatcaacaaagctttcttgtatttgtcttcaatacagaaaaatgacggcagttttactgcaaatcctaatgagtcagaaggaaacagcgaaagtatctctcaagttataatagctatgaaaagatatggactttcgcctcatgacagtttttttacaaaaaatggatatacaccatatgacgcacttgatagttatagaataagcggaggcggatatcttcatttaaaaagtgatgccgacgcaaatcaaattgccagcgaacaggcacttctcgcattgactgaggtgcaaaagccagctaatatgttaatctatgaccgaatatggtttgacgctaatgtaaaatatttagagagtattacaaaataactataaaaaaggacatttaaatgaaagttaaaaaatcagctaaaattttaaatattagtattttaattatattgtgtataattctgttctcaggctgctcaactaaagacatctctaagtcaaatttatatgataatataaataatgattcttattcaatatcttcagaaaataaaagttacaataaagatgaggggggtgctgtaagcagtcacagtttcaacagcagtaaaaatacagatttgtcagaagaaaatagtaattctgatacaaataatcaacaaagcaataccaaaattccctccgaagatatgagttccaattctgaacagaatgttatgcccgaacaaaacggtacatctaatacttcaaactcacctgcaaatgacaatcatgaaaacctcgatacatcaagtcagaacaccataaataatgaaagccaaacaacacaacagatacctgatacacaaaataatccgtcatcaactgaaaatgaaggttctgatagctctaactattgttcatttattgtcgactgcaataaagcttttgaatccacagaattatcacaaagcttaagagatgtgcttcctaaggacggaataatatattcaggaaatccgaaatttaatcagggtgaaagtatttttgacctgttaaaacgtctcatgaaagaaaatggtatacctttagagttttcctcatctcctgcttatggttccaaatatatagaaggaataaactcattacacgaatttgactgcggcgaattatcaggatggacatattttgtaaacggcagccgcccaagttatggatgtgataaatatataataagacccggtgatgacatacgctggtattatacatgcaatctcggcaatgatatttgataaaactattcgaagttttattattcactttttgcagataaaagaagagtaatcaaccgtttaataatttgcggcattctagtttagttataattaatggaggatatatatgaaagatgaattctcacgttttcacccaacaataaattttatatactttgcagcagtaataacattttcaactatctatatgaatccaatactactttcaatatcattcatttcaggacttatatactcaatctatttagacggacgcaaatcatttcgttttaatttgcttactattttaccaatttctatatttgccgccttagtaaatattgcattcaatcataatggaatgacaatattatgctatcttccaacaggaaatcctgtaacgttggaatctataatttatggaatatgcgctgctgtacttttatcaaatataattatttggtttttttgttttagccggattataacatcagataaatttatctatctttttggaaaaataatcccctcactttctctggtattatctatgattataaggtttatccctctttttaaacaccagtatcaagcagtgtcaacggctcaaaaaacattgacatacaacaataaaaacaataaaattacatcaaaaataaaacattctctcaatatattttcaataatgctgacatggtcattagaaaattctattattacagccgattcaatgaattctagaggatatggtttgaagggcagaacggcattttcaaactataaattttattttagagacggtatagcgctgataatattggcagcgcttattataacgttaatatttctaacatttgtgggatatgctgatattgtcttctaccctttctatgaattaaatattaccggaattggaatagtgggttatattatttatgcaggtttatgtattttaccaatgattattaacataacggaggacatgaaatggaattattttcggtcaaagatttaaacttttcatatacaaataacaggaataattttgccctgaaagacgtaagttttaaaattaacagcggtgaatttataactctgtgcggtaaatcaggctgtggaaagaccagtcttttaagacagttaaaaacaaccttgtctccaagcggatttagatcaggcagtataaaatactgcggtaacgaacttgaaaaaacagacagttgggttcaagcatcagaaattggctttgtaatgcaaaaagcagaaagccaaatagttaccgacaaagtatggcacgaaatggctttcgggcttgaaagtttggggtatgacacagacgagataaggttaagagtctcagaaatggcaagtttctttggtctgcaatcatggttttataaagacacaaataccctttccggcggtcaaaaacaacttcttagtcttgcgtcagtaatggtattagaaccaaaaatacttatcctagacgaacctacagcacagcttgacccaatatctgccggcgattttatgcagatgctgcttaaaattaactgtgaatttggaacagccatacttgtttcagcccacaatcttgaggaagtcgtacctatttccgacagaataattgttatggaaaacggcaggataatagctgataatgaacctcggtccgtcattcttaatttaaggaacacacaaaatgaaatgttttccgctatgccgtcaccggctcaaatttacgccagtgttgacagtggttctaactgccctcttacagtacgagaaggcagagattggataagctcatatgtgcaggataagaaaataaaaccggtaccggttaaaaaaattggttacaaagaatctgaaacggtattgaaagccaaaaatatatggtttagatatgaaaaacgtgataatgatattttaaaaaatatttccctttcactgcacagcggtgaatggcagtcgcttgttggaagcaccggagttggaaagacaacgtttttgtctatcttatcaggaactaaatctccatacagaggaaatgttgatacaatgggaaataaagtctgccttttgcctcaagatccaacaactatatttgaaaaagatactgtgatggctgatttggtacaagatataagtcaaaaagacgagacttatcttcagaatataattaatttatgtgacctttctgaattactatatatgcacccatatgatttatccggcggcgaacagcagcgtgccgctttagctaaagtattgttaaaacgcccaagaatattgcttcttgatgagccgacaaaaggacttgacgctttatttaagaaaaagttagccggaatactcctgaacttaaaaatccgaggaatatctatcattatggtatcccatgatattgagttctgcgctcaatattcagataactgcgcatttctgtttgacggagagattatttctaaagatgagcctcgtgcatttttttcgggaaacaatttttatactacatccgcaaatagaattgccagacatataattccgaatgcaataactaccgatgatgttatatatgctataggaggttcccctgtcataaccaaaagtccgccaaatcatgataatcacaattcaggcacaccccctcagcttacgccggttaaaacaaatataataacagacaaagcatcaaaaggctcggtatttttctcaatattatccttattattaataccgttatgtatatttttaggaatgaagtttatatctgaaagaccatattattatataagtatcgctattatttgtctttctataataccgtttgccgttatgtttgagggccgaaaacctcaggcgcgtgaacttgttactatagcagtgctttgcactataggtgttgttggaaaaattgcattctatatgattcctcagtttaagccaacagttgctattataattatttccgcaatggctcttggttctcagcgaggctttctgattggagtaataacagcattcgtatcaaacatatttctcggacaaggtccatggacgccatggcagatgtttgcctgcggtcttataggtttcatatccggatttatgtataaaaaagaggcactgccaaaaacgacagtgccaatatgtatatttggatttttaataactctgttaatatacggcgggattatgaatcccgcggctttaataatggccaatgatacaatatctatgtccactcttgccgcttattatatatcaggaatcccatatgacattatacatgcggcttcaactgttatatttttaatagttttagcaaaacctatgcttaccaaacttgatagagttaagaaaaaatacggtcttctcctcaaaggcagaaattcatataactaattattaaactcatctttaaagaaacataatgcagtcattttggaaacttctgatctggctgcattttcttttggggcaaaccgtccatcccccacgccatttataattccggctgctctaagatgcttgacgctatttttcgcatattcgtctatatccagataatcactaaattcatcttccaaattcatttcagattccatagattgtccgtataacttttcataaaatctatctatgattacacaaatatcttcacgggttatatagtcattaggtctgaactccccattttcaaaaccatttactataccatttgccgaagcccaattaacattatcaaaataccagtcgctttcattgacatcattaaatttcaatgaattgccctcatccgattgaatattgttttctgcattccaaattcttgaaagtacagacacaaattctgctcttgtcattgaatcctctggtctaaaactcttatcattatcaccaagcaatatttttttatctgacaaaacttttatataattatatgcccaataatcttgtgaaacatcagaataaattagaccttcttcaattatgttatttggcgttgcttcaggaccggcggttacagcaggtgaacttgtaatctcaggatcagaacttgtgcctgagccattcgaatctgtttcgttctgattcgtataatcatccgtataatataactttacaacatcaccgtttttaagtttataagaatccatcccaacacttggacttgttccgtttaccgaatacaaccatccgctgtttttgccgttagtgtattcgccaattgtaacgccgtttggtgaagttattgaagaaatatatccggagtccaatccctttgcagtatatccattttcgattaaaactgttttaattacgcttaaagctgtatcgtttgaagaaacagtctttttaacaggtgatatccatgtaggatatgaaccggtatgtttttcatcaccatgagccgtatcaccaataactgacactgttaccgtgatagatgaagttccgccccctgtgcttcctccgctgtttccagatccgctgctggaacttgacgaatttttaagaggctttatatcataaatattatatgttccataactatctaaaccaacatatgaaataatagccctaaatccctgctcagttgccagcttattaaagtctgtattatctacatatccaaatccgctgctatcctcaagagcataggaaagcagtcccgaaatcaggctgttaccattttttataaatctggaatcatttaatgaattaattcccaaagaagataatccgataattaccatagcgtcagtatttgatgaacctaagcttccgcttgataattgtttttcagacaatatatttactattttgtctactgccgtctttatttgactatgtatctttgtatctattcctacactttctgctgagctagctaaataatacttagaaagtgcgtttaataccattgcagatgagtcataatccggataattcacaccttcccaggtatatccccagataccgtcagaatttctgctggtaagtatatattccagcagcgcttcgcgagttaagtttccgttaacagtaaagtctcctgaatcatatagaagcattgcaaaaactgcatcagttacatatgtaatatcagatacgttatggtttgatattttttctattaaatcaaatacttcaccatctgtatttttcagttttttaatatctgcacctattgctttcaatgcaaaaccatcttttgctattgttccaatagattcagaatcataagcgtcatcaataagtaattgttttgcttctgatttgtttttaagttttaaagaatagccgccgcaaaccatatcaaatatagaccaagcctctgttgactcagtatataaagatgatatgttactcatcaaaagctttatttttttatctataacagtttcaggaattgaagaagaggtcggcgatggtgacgagcttccaatattgggtatttcagttggagcagaagtaaccgttgcttcaacaggaacttctgtaggtgacggggacgcactttcaacaactggtgcttcagttggagacggcgtagctgtttcttcactttcttcctctacagttacctcacaccaaggcaaaacaatatatgtaaaatcatcagaataactctcagcggaaataaaatactttcccggagtttcaaaagataatttaaagtttccgttatcgtctgttactattccggtgtcctttaagtcatatttatcagtacctgataatatttttatatccgatatcgcctcggtatttgcttcaatagtttcctgcggataacaaccaaagaatgaaacatacccgctaagattcaaattaacttcctgattaggtacagctgtcacattagttttatcgaaccatgagaatacgtcgctccaatatgacttatcctgatataaaaatattctgacatcatcattgtcttccagataagatttatcagcagtatatccggtatatgagccatacaaaggatttagaacgccatcattcggctgaattccattcacaaaaaatgaagacgccgaagcatctgcacctaagattttagtaataaacccactgtttatatctaaataatcttttgcggtgtcggctgtaaatccttcagagagcaatgtttgatgaacagcaatcaaaacgtccaaaatgcttacttgaccgtcgtcttcattttcataaccgtattgacacgctaaatcagatgaaactgtgagcgtttccggagcaaaataaaactcatcaccggaaagcgaaacagtaactgtcttttcctgactgcccgatgcaaaaacagcaccgctcatagcagacaggcagattataacagcaagcaaaactgagataagctggcgtacaaatttttgttgttgatagtttagatttttcataaaatccctccataaaataaaaatgcctgtacaaggtaaagtgtacagacacaaaaaacacagtgcgctatgcaatgtgtatttgccaaatccaataaccctgtggaccacaaaatgcagataaaggcaggtcttccgacttagcttcaacatatttggcaccttcccaagaaaactcagtggtataagccaaacactaggcgtcacggcagcaaggtctgtttgagaatttcactcatattccctattatcgctgaaatcagcgcacctttatctctattcatttgtaaattaacttctaggaattttgttctaaatttctgacaaactctttcagtttatcaaaactttcctcactgatgacatgttcaatcctgcatgcatcagtaagagcagtttcttcagatacccctattttcatcaaatacttgcttaaaaatctatggcgttcataaattttttctgctatatctctgccagatggaagcaaatcaatatatccatgaacatccacagatatataaccgctttctttaagtgatttgacagcacggcttatactcggcttagtatatccggtctcagtaactatatcaattgaccgaactttatctcctttgtttgataacaccaatatagtttcaagataattttcagccgactccattattttcatccgtaccacctcacttaatttacgtatatttttaatataattttatcataacgacaaaagtttgtcaagatttatcaaaaataccgttcaaaatatgattgataaattcactataattataagtatatcatccaacattaaaaaacctttaaaaattagtaaacagattgacaaaaatagtttcgtatattatgataagtaatagtaattttgcgtattaactatataaaaggagagggaaaatgattaataaacttaaagaactctataaaaaatatgaggaagttattctatatttattttttggagttttaacaactattatttcagttggtctctactggcttcttggtgtaatgtttgactatattgccgcaacatcaggcaacagcggattaactcttcaaaataacggttttatcaactcttcatgtgttgtgtttaaaaatattatagccattttgtttgcatatataacaaacagaatatttgtttttaaaagcaaaacatccggttttaaagctataactttagaaatgcttagtttttttgctgcaagattgacgactatggtatttgaggttatttttatgtttgtaacagtaaatgtatttgctcttcaaccattattaatgaacataattgcacagtttgttatagtagttctaaactatgttttcagtaaactttggatattcaaaaatgaagactctgcagaaaaaactaaatagtattatttgcggagttcggatatattaaaattacaaataccaataaaggatgtattagttatgaaaatgtcttacaaaattattatttctttaactgttatattaatattgggcttatcaggactttttacatatgaatactatattaataaaaatcagccaagtcaaaatcaagaagaagccgagaatacacaagacaatgttataacatcagactttgaatctgagaaaaaaccaatagttccatttacttcaatgacggaatcaaatggcagcttatatattacaaaatcactttcctcttctgccaatttagaaaatgtaaatattattcctatcgagtctgacttttttacaataattggcgaggatgtatattatataacaaacggaagcgatgaatttgctccggaacttagacggtgcggtttagatggaaacaatgacgtatcaataagcgaatttgtctctccgcttggctcacctgtagttattggtgactatatttattctgcttactacactgatgccgatgaaggtctgaataacggaatatataaaattaacataggtagcggtgaaactgaaaaagcaattgaaggtgaatattttatttatggatatgataatgataaaatttattatacttcaaatttagaaaaccgcggttcagggacaatacttcaccgcatgaattttgacggaacagataaaactgaagttcttaatttcagcgtaagaactgacagtattgttgtttatgataagtatatatttttctcagcatatgacgatattagccactgctacaaaatatacaggtcacctaaatcaggaaaaggaaatattgacgcttatagcttcgaatgtttctccaacgtttttgacgtaatagacggaagactgtattatcaggcaaattctgcagtgtattcatccgaaatcaacggggataatgaaataaaacttgcagacattgatgagaaaaatgacagcgcttatggatttaaaaagtttgacaataaaatttatttttacgaaaagtcaactcaaggagacatcctatatcaggcagatcttgaaacaggtgaaaaattaaatataagcaaataatttattaactcataaatgaatattatcataattaaattcactgtcaacctttgtatcgttaacaaagattacatgcagttaaatttgctgcatgtatcataaaactattaaataaatataaaaggagtttataatgccatatatcacaatagaaggcggagaattatctccgtcacaaaaggaagacttaattaaacaagttactgaagtctcttcaaaaataatgaaaataccttcagatttttttatggtcacaataaaagaactgccggataataacattggtattgccggaaaaacaatagacaaagtaaaggcagaatatctaaaaaataataagtaaaaaattcttatattaaattaaatataaattataaagaggataatatgaaaaaaactatactattttttctcttagataagtattcggattgggaatcagcatatgtttcatctttaataaatgcattaggtgaaaataaatatgccgttaaaactttttcgttatctaaagaacccgtaaaatcattaggcggttttacattaatccctgattatgacttagtaaccgcacctaaagactttgaaggattgatattaattggcggtatgtcctggagaacggaatctgcaaaaaaagtaaaaccttttgtaaaaatagcttttgaaaacaaaaaaattctaggaggaatatgtgatgccgcaggatttttagccacaattggagtgttaaataatataagacatacaggaaatgatttaaatgatatcaaacaatgggcaggagattcatattcaggagaagaaaaatatattttagaacccgctgtctgtgataaaaatataataactgccaacggaactgcgccgctggaatttgctttggaagttttaaaagccttgaaagtggctcctgaacagaaaatactcgaatggtataactttcacaaatacgggttttatgaagccccaatgcctgaaatataatcggaggaaaatatgaagaaaaaagatattttattcacacaggatgattttatattttcctaccgtgcagcagggatacttgttcacaataataaaattttaatgcagaaacctaaaaatgatgacgtatactcatttatcggcgggcatgtctcatcatgcgaaacttctgaagaagcgttgaaaagagaatatatggaggaactgcatgctgatataaatattaataatttattcgctattggcgaagtcttttttccgtggaaatcaaaaccttgccaccaaattagtttatattataaggttgagctaaagaatttatctgacattcagcttaatggaacttttcccggatatgatgagcttaacggaaaacggtatgacttggatttttgctggcttgatttaaacactttaaatgctgtaaaaatttatccagtagaattggttccgtatataatagaaaactctaacaatattgtacattttataagccggcaattatagggtgagttaaattaaacttataatattaatacacattatgtatttgctatattgatagtaaatacataatgtttttgtttataaaattgactgtaataaactatctatttcaaaaatattacggaaaacggtgctcttttcatggttaaaagcctgaggacagcgctgttttctcacaattatagagttttttgtgtgatttgatataacggctttgtttctttaaagccacttttatttatattatttaacaggattaatattcaactttattggttcaataatattagttttatataatcaactttatatatcctaaatctcataccaaacaattcaattattttattatatttaaatatctaatatctgtttgactgtaaaacataacaaaataactattgttttaccttaagtattatgataaaatgaagtgtaataatttcaatttttaggagtggacaatatgaagattaaaagattgcttgccggactcactgcagcctgtatgataactgcattaactccggtcttcgcgaaaaatgatttaactctctatgacggacaagtttctgttgagacagcaacaaaaaacggacttcttgcctttccgggagctgagggcggcggaaaatatacaaccggtgccagaggagtcgaaaaccctgaagtataccatgtcactaacttaaatgaaaatggtgccggttcttttgctgacgcagtctctcagcctggaagaattattgtttttgatgtaagcggcactataaatttaagcaacacattaaatatacctagcaacaacttaactatacttggtcaaaccgccccgggcgacggaataacttttgcaggttctgacctccttttatcccacggtgtttcaaacgttattttgagataccttaaaattcgtcctactgatgacaatgagggtgaacccgatggcttgggcggaagatggaaccataatataattatagatcactgcagtgtgagctggagcgtggacgaaatgctgactttatatgcaggctccagtgaaaaaactgagtataccccgtcaaccaacataactatgcaaaatacaattggtgccgaaagtttaagaatgtctgaccattttaagggcgctcatggatacggagcaatttggggcggcggtcttgcaagctatcatcacaatttgcttgcccatcatgacagccgcagtccaagaatggacagagagcttgtatctacagatgttaggaataatataatttatgactggggcattacaaattcagcctacggtgccgaaccatattcttataattatattaaatctttggataatcctgaaaaatatcctattgtttctaagaatccatcaaacgtaaattgggttaataactattataaatttggccccggaacaaaagaaaatttaagaagccgaatttatgatatatcaaatgatcttcctgaaataacaaaagcaaatttctatattaatggaaattatgtaactggcaatgacgaagttacatctgataactggaaagggataaatttcccagaaaaagctgaaaaattatcatctcctgttaatatggatatttatgatataaaaactcaaactgcacaagaagcatatgagcaagtgctcgctgaatcaggcgcaacgctgccgaaacgtgatagtatagatgcaagagtggttgctgatgtaaaaaatggaacgggacgaataataaataatgcaaacgaagttggcggtattattaaaactgaaaatattagccgtgtgtttgagataccaagtgattggaaaacttcaaacaatatgggaactgccaaagaaaccgatattattaaaagtggaaaatggaccggttatacctggattgaggcatatgtaaatgattggactgaaaaacagccaaatcctgaaaatcctgacattatagttactgaacccgctatacaatctctaagtgatgagattaacgggcataaaatagaaaatggaaactgggctgttttatttgacaacgaacaattaagttataaagctataggtatccctcctaaaaactctgataccagtgttgtaaaaatggaactctatgacggtgcagaattaattaaaacatatgacaattctgcagaaataaacgattcaatctctcttgcaccaggaatacattatttgagttctaaagcatataacaataaaaaagaatcaacacaaagtcctacgtcaattgtatacgttaaatcttcctctgatttcggaacctttgaacatacgcaaattggaaagccttcttttgacggaaagggcggctcttcaatggatattgatggaacctatacaataagcggaagcggacttattggcggcacagaagattcatgtgattttatgtataaacaggttacaggtgactttgatataacggctaaaattgttgacataccaaaatatgagaatggtcaaataagcggtttaatgttacgtgaaagcttagacaacggttcaaaaatggtaatgctggcagacggatggttaaaatatggcgaaaacgtaagagcagtttatcgtactggtaaaaatcaagacgctgaaacttcgttttttagaaaggctgacggctcggttcttgataatgcaggttcctatgatacatctaaagaagaatgcagagttccacaacatatgagaatgcagagaactggaaacacgataacattatccgtttcagatgacggaaaagattggacgaataatccaagacagccacagtcgatagaaattccaggattatctgatactatatatgttggtattgctactgattcaatccaaggcgttcctgtaaaagactatttttcacaggctaagtacagcaatataattttaaatggaaatacggacgcattgaatgaactttattatttaaacaatcctgttataaatggtaataatgttaaagccagtatcataaataagggagaaactgcattttttattgccgcgtcatatgatgaaaatggtaatgttttagatgccgaactcagagaagtaaaagggcaagaatccccgacagaaatagatataacgctttcacctgataatggaactgttaaaacatttttatggtcaaataattttgaaacttgcataatgaaataactacaaataaaaaataatatatagctaaacttattagaatcagaaaaaacataaactaaaaaagagttcttatggtaaaataaaaccataggagctcttttttatactgcacgtacatattttgtatggttcataacttatttctcttaattttttactccatatttattcccatacacattcttcgctttatcagtatagtaatttacaaactcagttttgctttctgtgtatgcgtctctattattttcgtaacgtttccataaatctagttttagcttttcatataattttgcaatatccttattttctattaaataatctctaaaatacaactcgtcattatctccaaaacgcctcaaatgtaaatgaaacattttatctgcaaatccgcacgcagtatagcccttgttaaatgacatgcgagcaatactttctgacatacatatataatcattttcaactaatattttcttaatataattaaatttgcattcatttgttgtttctaataatatatcaataattggcttagcttgaattgtttcaatagatgtactgccgatatgacttattcttttaatataaccatacggtaatatttttaagatattctgtttttcatcctcgtaccaatttttccaatataatttatgctcagttaaataaataggaaacaattgccacaattcctcaagcgccatattagataaatctttaggcaaaataatcaccaccaacaacatttcataaaatttttataaaatttactgagcctgctttattgttccgtctctataagcttcaagcaaatcttccaaatctttaatttgttcttttattacctcaccctcatcaatatccgccaccatcttcctctttcccgctttttccaaaactactgttttagagtgtatatcaagctcttccataatagctttttgctttgattcaaaaggttcatgcgatgttaaaataagcccgtgggagttgtataataacgtgtaacctgctataccggtctttggatgatatccctttgaaagcccgccgtctataacaaacaacttgcctccggcttttatggggctttgaccttttctaatttcaacaggaacatgtccgttaataatatgtgacattgcaggagaaagcccaaattccttaagtatttttatacatatatcacgtttttcaacgtttgcataatacggattctttttttctatatgcagtttaggctcgtcaataaaatattgttcaaaagtagttattttgtccttaccaaagagcggagatttcggaccgcaccatagataccacagcaaatcctcaacatcggaatgctcactagttccattcttaactttcatgccttgtctgacttttctatctatttcatcaaatagttttttacctctgagctttttaccaaaaatatcaactgtggcaaaatttccggaaggcgtcataggaatacagccgtgaaacatcaagttagaattatagctgttataaatagaacctctctcacacataaaatacatgtgtttttttagtctttcacttgtcatgaatgcagttctaagtctttccattacctctaattcgtcatcagtaagttcatatggattttccgggtcaattgtaggaaagtttttgtcaacaagctcatattcctttccgtcaataattattgttcccttatcataatctattttatctaataaaagccgcccttccattttatactcgggatgacgctttataacttgtccttcaagtttaaattgtataattgttatcgccttatgtattttagaaataagtttctcatcatgcttgctatattcagtcacatcaatatgtcttggaataaactgttcacaatcatcttccgcataggcctccattgcaaaaatcgccaaaggacgtacactgattccatactcaccttctatagtgttcatattatcaaatttagaactgagtcgtatcacattcgctatacaagccatacttccaaatgaagcgcccatccattctatatcatgattgccccattgtatatccacgctatgatgattcattaaagtatccattattataggcgcaccggggccgcggtcatatatatcgcctattatatgaagacgggctatagccagtctttgaattagatttgacatagcaataataaaagcgtcagcacggcctattttgattatcgtttcgacaatttgcttataatactcattcttatccatttcataatcctgagaatgcagcaattcatcaataatatatccgaaaccttccggaagcgcctttctaacaactgaacgtgtatactttgaagcgcttactttacacacttcaataagacgatgcagtgtcagggtgtaccattcgtcaaggtcctcaatatcttcttttataatttccagtttttcttcaggataataaatcaatgtcgccaaagactttctctcggactcaggcaaagtgtgctcaaaaaccatatctatttttgattttattacaccggacgcattttttaaaatatgaataaatgattcatactctccatgtatatcacttaaaaaatgctctgtcccttttgggagatttaaaattgcgtttaaatttataatttcctcagacgctttcctgatagttccataacgcatatgaagaagctttaaatatctataatcacgtttttctctattgttatcagttttatcacttttcataaaacaaaaaccatacggaattatccgcttttcctttcgtaataattaaatgtccaatcgcggcaaaaggtgcttattaagtaagcacctctattcctttttcctctgcggcgcgtcttgcctctattgcttctttcagcatcatatctttaactttcataagtctgatttgggttgaacgctcattctcatcaagtttcatagtaatatattttatttgacgctgatattccggtatcataacgtgctcgagagcatttacacgccttcttgtcttttcaatttcatccgccattaactgacacgatttttcacattcggcaagcttcagcatatccggaaaaacagagttcagagatgctaccgcatcgtctaaatctcccgaagtaaatgcaaaaccatatgaataaatatcattctcagccggggttcttgtctgataatcaaatacaggtatctcaacactcataacattctgcttagacacattaactgaaaccgactgcttaggcgccaataaagcggtctttaaagcgggatcattcataacagcggccgcaagcacaaatttcttatttgcttcctctattcctttttcaaccttctcacgcagctccttattaaaccgtaccaagtcaagaaaacgccgcataagttcatcacgtttatcctttaacagtttgtgacctctaagagctgttaccagctttttctttagccgtgtaagctccattctggttggatttacttgtgtcattgccatatgaattcctcctaactcttttcttcctcataatatttgtcaagaaattcatctttaattctctttaactcgcttctcggcaaaattgacaaaagcgaccatccaatacttaatgtctcctcaatatcacggtttgtttgatatccctgcgaaacatattttttctcaaattcatcagcaaactttgcatactttttatctatatcagttaacgcggcctcgcctaaaataaccataagttctttagcgtcttttcctcttgcatacgctgcaaacaactgattcatagtatctgcgtgatcacgtcttgtcttgccttctcctatacccttatctttcaaacgtgaaagcgatggaagcacgtctataggcggcataatattttttctgtataattcacgggataatattatctgaccttcagtaatataccctgtaagatcaggaataggatgagtcttgtcatcctccggcattgtaagaataggtatcatcgttattgacccctttttacctctctgccgtccggctctttcatatattgtagcaaggtcagtatacatatatcctggatatccgcgtcgtccaggcacttcttttcttgctgcactgacctctcttaaggcgtcagcataatttgtaatgtcagtcaggataaccaaaacgtgcatatccttttcaaaagccaaatattctgccgctgtcagcgccatacgcggagttgcaatacgttcaacagcagggtcgttagccaaatttacaaacataacggttctgtcaattgctccggtttctttaaaactttcaacaaaaaagttagattcctcaaaagttatacccatagctgcaaaaacaaccgcgaactgctcattctttccttttacagtcgcctgtctggcaatctgtgccgccagctgcgcatgcggaagtccgcttgcagaaaatattggaagtttttgtcctcttacaagagtgttaagtccatctatagcagaaataccagtttgaataaactcctcaggataatttctggcagccggattcataggaagaccatttatgtccattcttttgtcaggcaatatttcaggaccattatcaatgggacggccaagcccgtcaaaaactctgcccagcatatcttcagagacaccaagctccatgcttcttcccaaaaatcttaccttacttgttgataaatttattcccgttgaaggctcaaacaattgtaccatagcatcactgccgtcaatttccaaaactttacagcggcgtttctcgccgctggataatatgatttcacccaagtcattatagtttacatcttccacaccgcgcaccagcataagagggccggcaacttcttcaatggttctatattcctttggcatattaatcagcctcccttgtgagcataccagatatttcgctatttaagttttcaaggatttttttatattctccgtctatatcatcttcattataatatttaaatcttcctatctgttcacgtaccggaagattcaccaaactttcaacatctccgcccctgtttaaagcttctatgctattctcataaaaatctataataagcttcatcatataatattgtttctttaaaggcgtataggtatctacgtcatgaaaagcattctgatgcagaaagtcctcacgtatacttcgcgcggcttcaagctttatcctgtcagttggagacaatgcgtccattccaaccattttaactatttcatccaattcagactcttcctgaagcagatgcattatatcatttcttaaattcatccagttgccgtttacatgctcattaaaccatttttccattgtgtcaatatataaagaataacttgtaagccaatttatagccgggaagtgtcttttatacgccaaatttgcgtcaagaccccaaaagactttaacgattctaagcgttgcctgagataccggttctgaaatatctcctcccggaggagacacggctcctattacagaaagagcgccttctttgtcatcacttcccagagttacaacacgtccggcacgttcataaaactgtgcaagccggcttcccaaatatgcagggtatccctcttcaccaggcatttcttcaagtcttcctgacatttctctcagcgcctctgcccaacgtgaagttgaatcagccattaaagcaactgagaatcccatatccctaaaatattcagctattgtaataccagtataaattgatgcttcacgagccgcaaccggcatatcagatgtgttagcaataagaacagttctctccataagcgactttccggtctttggatcaatcagttcaggaaattcgttcaaaacgtcagtcatttcattgccgcgttctccgcatccaatataaactactatatcagcgtccgcccacttagcaagctgatgctgaacaactgtctttccgctgccgaatgggccgggaacagaagccacgccgccctttgcaatcgggaacagtgtatcaataacacgctgacccgtaacaagaggcatgtcaggagacaatttttctttataaggacgtccgatacgaacaggccatttttgcattaaggttatttctttttcaccgctgccggtatcaattattgcaataacttcatcaaccttgaaacttccgtcagatatcgacttgattttaccgcttatatttggaggcaccattattttttgagtaacaacgtcagtttccttaactgtccccaaaacgtctccgcccgtaactttgtccccattttttgccgaagccttaaactcccactttttatcccgctttaaagaaggaacctcaactccgcggcgcaagttatttccagcagctttcataatatcatcaagaggtctttgtataccgtcaaaaatgcttccaatcagcccgggacctagttccacactgagaggcatacctgtagtcacaacaggcgttcccggaccaagacccgaagtttcttcatatacctgaaccgaggctttatcaccgtgcatctcaattatttcgccgataagatgctgttctccaactctgacaacatcatacatattacattctttcattccctctgctattaccaaaggtccggcaacttttttaattattccttttgccatattcaacacttcctatttatcattttagtcattaaatataatatctgaaccgacagctttctctactgacttccttacccccagtatgccgctgcccgtatttccggatactccgggtatcattataacagcaggaaggatagactccgtatatttttctatctcatcagctacatattccgaagctttttcagtaatataaattacagcaaactttccgctggatgcaagctgtttaaatatttttctgcattcatcacgcgtatcagtaaaataagtgtcaagacccaaagttccgaatccggcaacactgtctttatctcctataacagcaacattatacatagagatcacgtatcctttccctgattaattcatccggaagagtattctttttcccggacaaaataatttgaaccgctttaagttcattttgttttgccaatatataagaaaatataggggcgactgtaaatggatttgatttttgacttttgattagatccataatcttattatcagtccatttttcaaattctgacattgacacactgagtttctctgccgcttccttataattcgtatgttcaagatatttatatacatcatttatgctttttccggctgccgcagctaaagtatcgacatctaaagtttcacattcggctaaggcacgctgcatgaaccctttggatttttttgtcaatgcgcctctggcagcaattttaatatcactgagcgccacaaaaagttcagcataatcttttataatagatacgtcggaagctgttccttcacttaaaatagtctcaagacaacgtctgtcaatataaatatcgcactcctgtccgtctcccgtctcagcaaacttctcagtcgcttcaactgcagttcctgaaagaaattcaggaagttcagaatagttttttatcttaacagcatttaatattacttgaggttcaacagttccgcctcgcaaaaagtatccttccgcttcttcagctgtgaatacagatttgattgcagcttttaaattatgaaaatcgatttgtcttaaaagagtttcaaacggtgttttatcagggatcaattcatttatgagttcccacattttttctgtttcgtctttctctaattcttcaaagcttctgtaattgtctttaattccataccctttttcagtcaaatactttaaagcagtctcaaaatcaggacatataagaagctgctccaaatcagatgaactcagtaaatcaagttctctggcgtgtatcctggatactgcatatgtgtattgctcaaccatataaatacctccgaagtcagtcagctaaataatttcatataagctttctcttttatactgtcgatattttcttctattaatgcgtcaatagtgcaattttcttctatatcgccgtattttataacaaacccggcatctatcttcttactcttaacaattttaagctcaggataattttcagaaacaaaactattaaacgtatccggcattctttttatatcattttctgacaacataagctcgccatttttattttgagcgtattttgaaataagtgtttgcaagaaattaaagtactctttaacgtcaagagactttagcttttcagcagcgtttgcaacagacttgtcaagcagtttttgcttttcttcaagtattgtttggctcataccatgttctgcagacgtttcctcgcgttcaaactcagttttaaacactatatccgccttttgttttgccgcttcaattttatcattagcactttcagttgctttttttataatctgcttagcatcttcctttgcttttgcagttattttttcagccgcttcgactgcttctctgttaatttgtccgataattgaacttaatcctgcaatatcttccgccaccataatcactcctttcgatttatagtatagcttagatatttaatccaccaataccatttattgaaagaatcgataccaagagcgccaaaatagcataagtttcaaccattgcggcaaatatcattgatttacccatttggtcgggacgttttgccaccagctgtatacctgctaccgccgctctcgcctgtctctttgctgaccaaagtccaacaaaagccataggaagacatgccgccaaatataatagaccttttgcaatagaaatatcaccgctgccgcctaaaataccaatctgtgataaagttataaatgcaataagcagcccgtatattccctgagttcccggaagcaattgcagaatcaaaactttaccaaacttgtttgggtcctctgtaacaacccccgcagcagcctcacctgccataccaacaccaattgctgaaccgatacctgccattaaagctgctaaagcagctccagttaatgcaaacacaatacctaaatttcccatttttacttttcctccttaaacttaaaataatttgtgtgaacagaaaacggtttaaatttttctccgccgccttcataaaattttccaaaaaattcaacaaattgcagtctgtttgtgtgaacatacgcacccagcaaattaattgccatatttaaagtatgtcctataacaaacactaaagtaaaacaaataactcccaagaaacctccgccaaacatactacccatctgattaaatacctgagctattactcctgtagccagtcccaaagctaaaagcctcgaatatgacaaaatatcacttaaatatcctgttacaccgtaaagctcatataatccttttgctacacgctttgccggatttttggaagaacgcccggcaaacaatataatgccaacggctcctacaccggcgcataccgcggctgcagttccaacttcaggaggtaatctaaaagtaagccccgccatgtttataaacatatccatagtaagaagataaaccactcctccccccaccaaaagataccaaaacacgacatcgtaaattgcaccttttatatctccatctttcgccatctgataaaattttattcctaaaccaacaaataaatgaactataccaacagcaaatgaaaataccagcattctcattggatcttttataggctcaaaccataatggaggtatagtaaccgcagttccaaaaaacgtcgttgagattaccttgacagcgtctccaaaaaatcctccgaacagaactccccaaataaaggttgatattccgcaatagaaaaacatttttaatgttttctttataccaatattcatatcgggataacgtaaaattacgaatgcgcagcctattatcataagaagtccatatccggcgtctgacagcatcataccaaataaaaaataataaaataaagacattataaacgtagggtctatttcatgtttatttggcatactgtatgtttccagcaccgtctccacaggttctgaaatagaattattttttaaaagcacgggcggattgtcttcctctgaaacatcacttatttctactgccgcattatactttcttactaattcatcttccagcctgcctgtgtatttttcaggaacatatccatatatgacaaagaacttttttctctgatttgtatcagctagggtatgatatttttcaatacgcatggtataatagtctaccataaatttcaaaaggtctctgtgctttgactgcgtctcaatccttttcgtatttttctctatcatagatttatcaagttgaataagattttttaaattttcaatttcatttgctggaatttctgttgaaatatactgcggacgtgaaaaaccaatatttcttaaatatgattctatctcagttcttttttccttacggcagattataacggcacatgtctgctgaggcgcggaagaaataatttcaacatcaactgaatacatttcatcttggctaatcccttcatccgacaaaatttcattatattgttctaatatatctttaagctcatactcctcaggaaaaactccaattaatacagaagtttttttagtgcccataaaattcattggaatatctaaatttagccaaggatttaaagctaaaatcgaattttctttcttagctatatcagattcaagctcagaattttgctttgacaaatcatttagttcatgagcaatattcataactctgtcagaattatcaaccatttcataatactgttcaaccgacagcatctttttgccgctgaacatagccaacagcggaacgtcttccggcgaatatttctttaaaacttcaagcgactgttctaaatttgacctagcttttgcaaatgtagccgctgacgacgaagtatccattttttcaaaaccatcttctgacaaatctacgcttatcggttctaaaactccatatctttggagagcttccaaaatactcttacggtgtgtttttaatccataaatctccacccttttcattggcagcttagccatacacatcctcctttcttcataaagcagaatttataacaattctcttttaactatttctaatatagcgtcagtaccggctgaagacttttttctaatagattctatctcttgtttaagtttagaatcagtattcttttttaactcttcaactttcagctttgccgctttagaagcatcagataaaatttcagatatactgtcatcagcatttttcataattttatctgcttccttttttgcgtcttcaattattcttttggcttgctctttagcttctttttcaattttttcagcccttgcctctgcttcagttaatttatttattgtatctttcggcatattttaaaccttctttcaaaataactgtaaatctttcttagtttaccacaaaatcaagataaaaactgtcgagaaacatttttatttaaaaatatcatacaatactttccttattgtccatattatactaaaccatttttaatttgtaaatagtttttgtaaaattatacagatttttaacattgtaattgtattttgccaaatttccttttttatatatctagctgacaaaattagtttaattacaaattattattttgcacataaacatatatattaaactttgtactaatttccaaaaatcattcataaacataaacaaacaagttttcgggaggcgaaaaatgtgagacaacatatagaagaaagaactgttgagcttgggaaatacatagtcgaaaaaaaatgtacagtcagagaagcagcaaaaaagtttggtatttcaaaatctactgtacataaagacgttacccaaagactcagaaaaataaacttgatgctcgcaaaccaagttggttccgttcttcttgaaaacaaaatggaacgccatatcagaggcggtaatgcaaccagagaaaaatacagacatataaaagaaacaggatgattaagaccgccttttcggcggttttttatatatagatttatataattatttaaagcaaaattttcgatatatttcaaacaatttgtgcagattgtcgtctaaccgattatattgacgacaataattgtaatattatattaactttttattaatattttttaattttaattgactgttctcaatattagagatataatttaaatattattatctatataaaattaagaaacggaggaaaacgaatgaaaaggatttcacaaattgcacctgaggttatagagctgtcagaaaaatgtattaaaaataataatatagaccctgctctatataaaaaatatgatgttaaacgtggtctcagagacatcaatggaaatggtgttttaaccggtcttacagaaatatccgaaatatgttcaagtaagattgttgacggaaaagaagtttcatgcgatggtgagctttactacagagggtataatattaatgatatagtatccggattaaatgggcgcaggtacggatttgaagaaactgcttacctattattattcggtgagcttccaagcagcgaaaatctgcacagctttctttcactgctctcagagtaccgtaaacttcctacaagttttgttagagacataattcttaaagctccaagcagtgatatgatgaacacattacaaaggagtgtgcttactttatatgcttatgataaaaaagcaaatgatacatctattccaaacgtattgcggcaatgtctgcagctcatagcattgtttccgcttttttctgtttatggatatcaggcatataatcactattattccggcaacagtttatttattcatcagccggttgcaaattattctacagctgaaaacattctgcattgcctgagacctgacggaaagtttaccgccacagaatcaaaaattttggatattgcattaatacttcatgctgagcatggcggcggaaacaattcaacttttacaacacatgttgtatctagttcgggaaccgacacatattctgtcgttgctgcctcattaggttccttaaaaggtcctaaacacggcggcgcaaacattaaagttgtggagatgtttgagaatattaaagaaaatattaaaaattggaatgatgagggagaagtcagagattatttgagtaaaatgctggacggagaagtttttgataaatccggtcttatttacggaatgggccatgcagtatattctatttctgatcctcgcgctaatatttttaggtcatttgttaaaaaactatctcttgaaaaaggctgtgatgaagagtatacgctttacagcatgattgaaaggcttgcgcccgaagttatatcagaaaaacgtaaaatttataagggcgttagtgctaacgttgatttctacagcggttttgtatataaaatgcttggtcttccaactgaattatttactcctatatttgctattgccagaattgccggctggagcgctcacagattggaagaattaataaatgcaggaaaaataatcagaccatcttataaaaacgtatgtgaaagaaaagattatattgatattgaaaacagatagatttctattatttctaacttacagcaaaacacggttaactataagttagccgtgttttaattttgatattataattctattattataaagagaaatataaatagtaaaaaatgggttacaaacatctcatacatcaaaacaggacaaagtttttttatatatcatcattaatgatttgtatgacaacggtatcgtaaaatatagataataaattaccaaaacattaattttgtattaagaacaaaggagctaaaaagaaatgtctaaacgccgaaacttaaatgataactcaatagcaaagaatttttttcgacactaataattgaatgataaatagaacaaatccaacactatagaggaaacaagacagataatatataaatacatagatttttacgctcatcagttcattcaaccaaaatcaaaactgacaccgatagaataccgatgtcagtatgttcttaaattttaatatcaaacaccataaataggtgtttgaaatatctaaacaatttgatgcagttcaaagcaatatataatataaagcattttatttttgcaatctaataattccgtatcaaaatttaattttttattataaactaaatatactaacaattacaacataacttttataacattaaataatacttattaatatgttttaaaaataaagaaccataagcataaattcattatctcttaccattttataaattaggtcatcacgtgtagaaccattgttaaaagaatcttttgcttcctggagttcgctttctttcggcatacgtccaaacaacattttatatgctgaatttataaaatctgtatctgaaacatgctggattatttctgtaagacagaaatttgcaaattctgcttcagtcattcttccggatgcaatttcctcagcataatattcacactctgtatcgtctatagtggttaaagcagcattatagcacctttttacataatcacgaaccaaatctttctttgctttagtatatcgtttttttgaaacttcttcaacatcaaaatatgataataattcgatttcagatgttataaaatatggtttatgagactcaccaaatgttgtaagttcacctgccacatttatactatcatctgacccggaagcaagatatgaaagcacataacccttatcatcttcattccaatctgtatctatctgatacttagtctgatgtgtttttgtattccacgttatatccaaatagtaatactttccatcatcaagttttacagcattccatgcgtgtccgccattattctctaaaactccgccgagaccgagtatcataacacagtccacatcacaaaactttagaactgtctgcgcaaatttagaataaccctcacatacaaacgttccatttaagataccattaatgctatttgaccatctgttatgacttacactgccatcactttcataagcatatctagtttccttgcaaagcttttcattaagcaatttaattttttcataatctgatgtacatttattaatttcagtaatatactcatttaatttgcttacaagggtttcgtttgtacttgcacgctcctcaacattttgatacggtttatttatctccataacaatattgccaccgctatagctcatttgcggtgcaagccaataatactgcggatgatctactctaaacaacataaacgcatttgtaaagtctgaaacaaactgttcctgatcattttcaccataagcagtttcaagttcctttaaaggtatctttatagatactgtatctgtatcatcactttcttcataagcaaacatttcaccctgagacattctttcacacacatcattataaactgagtatattttctttgccatatcaggcttattagctttattaagagcttcatacccaagtatgctgtattcggtcttaaacagagtttctacagttaaagcttctgttggaactgaatggcttacaatacgctcagtaagtaatgaaatctgatcaaccgtaagcaaatcatagcttccgagtcttccatcaccatagccttttacaataccagccgaactcaacttatcaatatctgacttagcccattccggaacatcagtaaactccattatattcccatcaaaatgctcatcaccaaggcagcggctaagaatgactaaagcttcaatccttttgattgtatttttcggtctaagggtgttatcatcgtaacctttgactatattgtttcctacagctattgctattgaatatcgataatctgtagttatactgtcgtaatcagaaaatacagttaaatcactttcacctttttcgagatttgattttgacgcagtaataaattcatttattgcatactctcttgttgaatactcctctgcatatatcggtaatacggtaattgatgataaagtgattagtattgctaaaaatatacttatttttctcctcattttaattttctccttattttatatatggtttacaaagcggctgcataatttctaaactattccacagaatatatgtttttataccttctcttttatcaattggtacggtaatcatatttgtaccaacgtcaaattctttattatctgttcttacactcagcatttctccatcaagattttcagttttctcaataagtaccccatccattttatacggcacatacaataccaaatttccattataagaatcaataaaccgtatctcagtctttgcttcccaatatgcgccaaacattgcttcatgctttattcctctgcaatcatacataaaatcctcatctgtaaacactgacgaaacatctgtatttttccaatcaatgttatttgctgaatatgaaatcttgtcattaataatttttatatatatacctgtctgtacgagtggtgatacatatatttcacaaatatttccgtgattctcataaataaccttattatccggcaaacaaacaaatattctatttccgctggcttttacagagtattcatctttaattacatcactatccgcatttgaatagtatgacccataaagagttatatctcctgacaaatccatatttccgttaagggcagtcacacatcctatcatgttcattttcccgattgatgttactgcaccgccgccttcatattttgcagtattattgaaaaaactagaatacgttattgttgctgaagcgccattattgtataccgctccgccgttagagatattatcaaatacattacaattgagcatattaagctgtgcgtttctttgcaaacctattgctcctccgtatccggaagtattggaacgcaaattacaattttttaatttaacactgccgccgtcagatgaaatagctccacccagcgccccgcttttgcaattataaagcagacattctgtcaaattaacttctcctcccttattttcaattcctcctccgttctctagactgtaaccaccataaaaaactagatttgatgcattaaaaattccattttcttcaactttaataagttgaatattttcatcgttatataaaatcaacatattgtcattagcacttttaacagttaccttattactaatattaattggctcattcaaatatacaatgtttttatcgtcctcaaaaccaaatgtcacaatttcatcagtgttctcagcatatatcactgcttctcggaatgatattttaccatcaaattcgtcaacaatatcatcagatgctgtaacaatagaagattgttgttcttttaccgacaatgttcctagcatcaaagtatcaaaaccacaatttccattaatctctgctataatatcataagtacctgacaactttacattccacgaattaaaacttattgtatctgaaatttcgccgtagccgacagcaatattatcacggctatataacaattctttctcctcataattcaacttattaaccgcataaacacttacagaacaagaaacatttccattatcataaatcgatgtattctttatgttaaatgcaaaaatctctccctctttaagtttagtctcatttcggtcaagatttgtatatttatcggtattgctgtctgacaaatataaattcaatctagcaaattttagattatactcttgtgaatttattactactgcctgtaaatcactgctttctataatattattatcttcctctataagaagcttaaatttaattttctcaccgttggaatatacacgacatctatcaggcaactccacgtctgccgcaaagaattttccaaccggttcttccatggaaacgtttgctttagaaaaatcgctccattctccatctttaaaatatgatgtataaagcgtatatgttggatgatagaagtgcttagttatcaaatcaagttgagtataactaagttcaacatctgccataccgttgttaaattctccaatttctgcgtttattataacatcagatttatctatgaaactttcaacaactgagaaattacaagtatatgtgttattataataatatgcttcggttattttgtgttctggattaaccgttaccgaaagcgtatattcaccaacatctaatccttttatctcagtcatcaatttttttgactcatatgatttaatcataacattttctatttttgtttcatcatatattatattaccgacactgtcactaacctgtactcggtattctaaatcattgttaaaatcaatatccgaatcattttctatcccaaccacggcatatataatttcatccttttctgctttttctacttttgcttcaatatctctatctatagaaatataaacatctttaggatataattcactgttatttatagtatcaagagtggcgttgggattatcttcacactttatatcatcggtataaacgggaagcaatgtaatactttcaagcacaccgcttccacctgaatagccatcaaagctccatgtatcataaccgttttgagtataaggctttgtattgagcacctgcatcttatttggagcaatacgtctgttttcatctgatattctctcagaatcggaatcagaaactataagagccttcatatattccggatctgtgttattaaaatcgttatcgcatatataaccccacattgttatggcatgcccgccatttctttgaccatcatctgaaatccatcctaaagttattcctgcgccgcttccctgttctaatgcattcgtaaccttattaatattcctatgttctttggctaagtctacataatcaattaaatcatcccaaaaatactttttcaaataacctccgctaattccataattttttactcttgaccagcctgtgccaaaggtttgcggaatatatgaaccatcaaaaaaccactgaataccatatatctgtgatgaaccaaaatcggtaaactctgaattaaacaaatctaaaatatcgtcttcactatcaaatttttcatcagggttttcctcctgtgccttcgtattccatccagtataacggagcatatttgaagttgatgcggcccagcacagctgatcatcaccaaattctgatatatttgtcttttcagcatctataaaatcaagtgattccattgtaaactctgaattttccagcttagcgcttatcagctttttttgtaccatattcaaattcgtatccgaaagaccggtaagaaagcatgtagtattctcctcgtctgacagcataaattttacagcataataaccgttcgtcaatacattttcattgtttgacaaacttacgtcaccttttgataatatatcatttagttccacactgataattttatcattctcaatataaatttcatatgacgcaattctagaaactatactgctatattccaacttatcagcatctataataccgtcaaggtaatgaacatcgttctctatatctgtaataacagtataagcaccatcagcttgctccatttcaagtgacgaaaaaacgtcatccgaatatgcgtaagtgttaaccgcaaacagcataattattgacactactgtggctgtcattattgattttaccatatactcatctcccaaaatattttactatcaaaaactctgtgaaccatcatgttatcggctatatcgaaacaaataaccgcacttcggatattagctttatattttacctatattgcttatttgcaacctaattgagtatttttttaccacagtctcaatctctcttccggagcaatatacatagcgtcgccctctttaatatcatataattcataaaaacagtcaagtgatgcaacaactgcatcaactctaacattatgggccgaatgaacatcaagcaataaagtgctgtcagttacgtatttttctgttccaagctgcgcccaaacccttgcatatgcttccagagcttctttctgggcatttttatcatcaccgatcacatccattacacactgcataccggcaaaatcagccatattttctccaatcgttatagagctgttttgaacaacaccgtcaacaacttcaaagttcttatagtaattaacaaaatgttgtattaattcactgtattttttgctgtcgttttcagtccaccaattgatttttcgtccaacctcatcatactgtgaaccactgttatcaaatgcgtgaccaatttcatgacctattatcacacctattgagccaagctttgcagcacggctggcatttttgtcgtaaataggataattcagtattcctgcaaaaatatttattatgttatattccggtatataacaagcatttattgtatccggtgacatatgcatcatttcacgaataaattctctttcggcacattgtcttatagtagtatttaatttatcgatatttactctcacaacattattaaaatatgttccaccctcagctggaggaacaattgtaggataattataattatccggatatccaatcactgcaatcatattctctatttttttaattgcattttcttttgtgctttcctccatccacgtattatttttaaaacgggcaatgtatgcctcccatatttcatttaccatatccgcaacatcttcagatatttcatcactgtaataatgatcacaatatattaatccaatatcgtacggcagaagctgtttaagctgcgtcaaattacttgtgcttaaaatagaatcctcctcaccgccagtcaaaacatccgcagctgttgaagcgccattttcttcttcctttccatattcaggaatcttgtcaccctcagcataagtcataaccaaagcatatacattattaaattcatcaagtacttttttttcttcgctgttaagcggacagctgaatgtcaaaccgagcttgacgatagcattaatttttaatgcagcaagatttgtttctacaaaaattttgttttcttcctttattccactatcatttgtgaaaataatattttcataattattaaatcctgcgtcatcgagaatttttgaaggctttatattattgagcactttatccgcatcacttattgaatatgtcttgctttgcacttcattaaaatcataagtttcagaatttatttcagggtgttctttgaagacttttccaagctctgcatccatcatctctgcagtgaatttagagtcatacatctgtctgatcagcaaacctttttgaattatcttagcataattaacacctttactcatttccccctgaacattaacagcgttttctatatccttatcagacacttcaataccacatgcagtcatatacgccttcattacctgaggataatatgtttcaaaagccttttccgtttcttccctgtaagatataattcctgcgctcccaatatcagaaaaagaaattgacggacacgctatatttgtttccggattcgctgcgctatccactgtgagtaatgggtttactcctgtttcagtaaatatttcgtttgaaacgttcaaaagtccgtctatgctatcagcactcataattctgttccttaaatctttcataagagccatatcgttctctttaggttctccagcatcctttatacaaagcaagagatcatgaacgcgctgttcagcactgccggtttcatactcaagttcatcgctcataagcttctctaaaatttcattctcttccgaatttatttttttaattatatcaccaaagctggaccaggcctcttttgattccattaccacgccatgctttgcatcaaatatacttgcagatgagagttcagcattccttagcaatttattatttgaatacccataaaaactttctccaacatccacagtattaaattcctcatctgttctgtcaatcagcaatttaacctgttcaacagttatattatcatcagctccaattctgccgtccccatagccatatacaatatttttttggcttaacttatcaatatctgcttttgcccattcaggtacatcgttaaactcaataggctcactggtttccgcttctgcatcagccgacgttttttcatcaagacatcttgatagtattgcaagtgcttcaattcgtgttatgttctcttttggtcttattgttttatcttcatagcctctgagaagtccttcggtgacagcctttgtaatgtccgatttatactctgaagcaatattgtcggcatctgtaaaagtagataaaatataattactgctggttaaattatttctccccaccgattgcacaaactctgatacaacatactctctcgtcgcatactctgactgttcctccgaaaaaacaggaactgatattcccgcagtaatcgtaaccgctgcaataactgcagtcagctttttaaagatttttttattcatccttcttcctccttgaactttctgaattatatcttacatatttttctatttatattttacattatattttatttatagtctatagaattttcataactgggcaaaaaaatgaaataactgggtactaactatgcttgatattataataaaaaactgatattatagagctaaaataataattggtaaggagatttcaatgttcaaatatataaaaactcttatagccattacaatttctattgttaccgtgtgtacggcactgacaatacttatgatttattcacattcaatggatgacacaagttacaatttatctttacttgcggatgacggacaggaagcaactgaagaaaagggatggtcggtttatattaataacaatgggaatataaaaggactcacccccgatggtataggcggatataccggtttagactacgcaggacaaactttttatttttcaagaataatgagtgaaagtgttgatgacccaatgcttagaataggagttgtaaaccgcactgtcagtgtatttcttgacggcaaccttatttacacagactgccctgatcttgataacagaattgggtatctggaacttcctatgctcgaatttgataaagcggaacctgtcgttatcacactgccagctgattatgtagggcacactcttacaatagcacaatcctcaccgatatatagtgaaaaacaaaatgcttatgacagcaccgtatatccttgtgatacatacttatactgcggctacgcatatgaaagcggtcttatttcagatacagtaaaaattattatccctgctgcacttctattttctctcggtctgttgctatgctcactttttgccgtttcatctgttaaaggtaagttttttccagaactcatcgttatagctattgcctcatttattcagatgtgcggtatacttgccgaagcaccatttttctacaaatatttccccgctcccgcaattgatccaatatatctgtgccactttttatcaataagtgtgctgctattatttttcataataaaaacaaaaaaacatcggattctttatatttctgcagcttcaattcagatattaacagttagcgtttatgttttatcacaacttggcgttctttctgtaagtcaaaatttatacacaaactttatgtttctccctcagcctgtaagcttctttgctctcggtgtgattttaatttgttcaattattaatataaataaaaattcaaaatttctaaaatacttttcttattgctcgataagtttattagcactaaatattataatgatgattacaagcctttttatagcacaaaattttgcatttgaaaaaataaatattattacaacagagtggaaaatgtttatgccaaatttatcattaaaaatattgtggtatatatgtttcatttctgccaccgcttcagtaatagcagaatacttatcaaatgcagccgaacgccgggctgaaattgccatacttgaagaaaaaaataaccttgcacttgaaagctataacaatctgcgccgtcagtcagaagaaatcatgatgatacgtcatgatactattaaacattataaaactatccgttcaatgctagaattatcatctgagaaattgtatgaatatatagacaaactaattggtgaaacacaaagtatacgtaccgttgtcagaagtaataacgagatacttgatatactaataaacggcaagctatcttctgctgctgagaaaaaaataaaaattgaaatagaacgttctgaggcgcctaaaagtttgccaatatctgatacagaactttgttctttagttgtaaatatacttgataatgctataaatgctgcatcaaaaactaaaaatccatatattaaaataaatttccattgtaaaaataataatttcatatttatatgtgaaaacaatatgacaaataaaaagaaaaaatccacacctgagcatggatatgggcttaaaatcatttataatattatgaagaaatataataacatggtgcgcatagtaacaggggagaacacattaaaaatttcattcgtattacctctttctgaacagaaaaataattaaaaataaatagagattaacttatgaaatacaaaattgaaggtgaaacattaacagaattttcggcggcaaaggatttgtaatgcagaaactagcagaaacggaactgtttttcctgaatttgatggacattttattcaataaattttaaatcaataagaacaaaatattattgataccagtaaaataacagcaatgagcggaatttgtcagatagatattcagaaagtgaaaggcattaaaaatttattatgtgaccgcggaaaaacgtttacaacattaaaaagagacataatttaaaaccatacgcttcctgctcctgtgacagttgtaagagagctcttattccatttatgtcaattaaaagtgaaataaacataggtaatgattaatataattgttccaaatatctttatttagtaactttatttcatataaaataaagttatgccgtgttaatttatagctttacaatttataatacaaatcatgtaaactctcagtatatctaaagttcctataataaaaagttaagctattaaaaattatttattatccttctatataagacataaaagtatttttaacatctttgaagcgatgcttactgataggaatattagttccgtctaagagttcaagttcgttaggtctaactgctcttacaaagcagagattaaccaaaaatccctgatggcttcttataaaaccgtacttacaaagctgtatctctaactctgatattttattacttgtttgcagtttttgatcttgcaggtatatacaagatccacgtccgcatgtttctatatacattatttctttaggtaaaaatttatatgtactgctattcatggatataataattttattctttttctgctgctcataacaatatataagagcttcacgcagtttttctgtatccaaaggctttgcgagatagcggacagcgtttacctcatatccacatagagccatttctttatcgttagaaataaaaacaattggcatattattcgaacaatcacgaatacatgaagcaagttcaattccgtttttatcaggaagcaatacatccaaaatcatcatatcaaattttacgccatctaagactgcttccatcaacttatcaccgctttcataacacattattgtattatctatattttcagaatttaaaatacagtcaactgtttctgtaatttgttttaaatccatcgtttcatcatcacaaacggcaactcgaaatatattcatcaatcaaaacctccgattcgtataaatattattataactttatttactatttttttcaagcggcaatatcatttattatcaaagaattaatgaaataggctgaacatttcaactcaaaacaccatacacaaatacactttttccttatatctaaggtaaatttaacaacataaaataattgtaacaaatataaaaataaaactatcagataaaatatacaaataaaatttcaatcataaattcaaatttttacgctgattttttgttttacaaaagtcctatcataattttatttatccaggaacataaattttttctaacaataaccacaacaattgtgacaaatcagtaaaaaatatactttataaaatttaacaatttaaaatattactgcatataaaaacacagataacttttataagttatctgtgtatagttaaatagacaattttaaatattaaccaaaatatctctttaaaagtccttcaaagccacagccgtgtcttgcctcgtcttttgccatttcatgtacagtgtcatgtatagcgtcatatcctaactccttggctaacttagcaagttctaacttacctgcggttgcaccgcactcagcatccttacgaagttcaagatttttctttgtatcaggatatactacttcacctaataattcagcaaactttgctgcatgttctgcttcctcaaaagcagcttgctgataaaaagctccaatttcaggatatccttcacggattgcttgtcttgacattgcaagatacattccaacttctgtacattcacctgtaaagttagcctgtaaaccttctataactctagaatcaacgtccttagcaatacctacaacatgctcacatgcccagctcatttctccattcgaaacctgctctgtaaacttctcagccggagcactacattgcggacatttttcaggcggctgttctccttcatatatgtatccgcatactccacaaacccattttttcataataattacctccaaaaaattgatatataaatttttatttttatcttaattattttcactcaaacattcattacaagtaccataaaaaagaagagtatgatattctatatcaccattaaaatgattttcagcaattctgtctatattaaaatcatattctgtttctatatcagaaattctatggcagcgccgacatacaaaatgattatgcggatttgtgttgccgtcataatgactttggtcatagccaacatctagtttcaaaatctctccattttcggataaaatatttaagtttctgtaaacagttccaagacttatattcgggattctttcacgaaccttatcgtatatccaatctgctgttggatgagacgttgtggcacatagtatttccagtatagcttctctttgtctgcttcgtttcataatttgtacctccaaatcagaaatagtaactattactgtttacaaacatataataactcaaagatttttatttgtcaagagtttttttaaaaaatttatattttaaattttcaaagtataaaatgcaaattaataaaaactaaaatagttgtcactctgattagagagtagcgaaaacaattatcgataaagtttatttaataatactaaatgtaaggtctttgtttaataaagaatttaaatagtataaaaatggatataaggtattgcaatttttagatttatttttattaaatatctagccaaattatatcttactaaatataaatttatataataattttcttatttatctactattattgggtcacgtgttacaattgaaaaaatatctcttactttttctgcaatataagttgctccagaattttccagttcttctcttgacccatatccaaacaatactccaattgaatcaatatcaaatttttttgctcctaatatatcatattttctgtctccgaccataacaattaaagacctgttttcaacaccacacaaatctaatgcgtctgatataacttcttcttttctagttttgctgccgtccaaattggctccggctataaatgaaaaatattgagcaatgtcaaaatattttaatattctttccgcaaatacttttggttttgaagttgcaactccaagacaaataccactgttctgtaaatcacacaataactcttttataccatcatataatttgttttcaaaaatacccgtatccttataatattccctataatactctacagcttttttagcttcttctttagaaaatccaaaatatttttcataagattcatgaagcggcggaccaataaacttatataattctgatctatcctttatttgaatattatattttttaagcgaataaatcacagaatttgttataccttcgccgggatcggttaaagtgccgtctaaatcaaacaacactacgtcataatttttcattttttaattcctccaaaatataaaaagacccaaaatattttattatgtgaactattgatttgccttttggtaggctttcccccattcaaccatagaatctaatattggcttcaagctatagcctgtctcagtcaaagtatattcaaccctgggaggaacttcagcatacacttttctagttaatagccctgactcttccattgaacgcaaattagaagtcagcaccttctgagaaatactcccaatagacttttttaactcaccaaaccgtttggttccatccatcaaatctctgattataagcaccttccatcggtctgatattaacatcaaagtcgtttcaaccggacatgccggcagttctcttttcatattatttcattcctctcagcataatagtatatatttgaaactatacatcaataagtaatctataatacattataaacacgaattttcagtttgtcaacttcactatttaattgttctatagttaccataaagaaactataaaacaaaaaagtgcttactttacaaatattagtgtaagtattatgattaagttataaaggaggcaatcatatggatataacctctgtatttaaacttttacaagacgatatacattctgttgtttttgctacaatcaacgaattcgggcatcccgaaacacgagtgatagatataatgctttgcgacgaaaatagtatatattttattactgcaagaggaaaaaatttttatgaacaattgattgataataaatatgtctctctgacaggtttcaaaggaaacagcacgatttcctctatcgcagtctctgtccgaggtaatgtcaaagatattggagctgaactattgaatgaagtatttgaaaaaaatccttacatgaacaccatatatcctactattgaaagcagagcagcactaaccgtatttcaaatttataaaggtactggtgagtattttaatttatccaaacgacctatagaacgatacaccttttctttcggagacgctgaacttacttggcacggttattatattaatgacaaatgtatccactgttttcgatgtctcagtgtatgcccgcaaagctgcattaatataaatgaaaattcagcttatataaaacaagaaaattgtcttcattgtggaaattgctttgatatctgtccagctagcgctatagaaagaagatgatataatgactcaagaagaacgcttaaaatacttgataaattatttattaaacgaacaacctgaatattcaaatataaatatccctgaaagcgtagaagaaaaaaagcagcttttgcgttcacttatgaacgtcagaccaccttctgatattagtcaggattttttattggttcaaaatcaatatttatcacaggaaattattaaaaaaggaattattaatgtgaatgacctgactccgataaaagaaaagatttatttgtggcaaggagatattacaacattaagatgcgatgcaatagtaaacgcagcaaataacagattgcttggttgttttgttccatgtcatgaatgtattgataatgctatacatacatatgctggaatacagctcagattagcatgcgataaaattatgaagtctaaaaattcttttgctgaaaccggcagtgcggaaataactcaggcatataacctgccgtctgattatatcatacacactgtaggccctattattaattcaaatttgacacagaatgactgtttactccttaaattatgctatcaatcctgtctcaatgctgcagaggaaaacaatctcaaatcaatagctttttgctgcatttccacaggcgaatatcattttccaaatcaaaaagctgccgagattgcaatagatacggtaacggaatttatcaaatcttcaaacatagaaagggtgatttttaatgtttttaaagacaaagactatgaaatctaccgaaaattacttcaaacaaattgaatgtttaaaaaatgtcttagacagttctgacgctgttattattggcgccggcgccgggctttcaacatctgccggttttacttattccggtgagcggtttgataaatatttttcagactttaagaataaatatggttttacagacatgtattacggtggattttatccttataaatcaccagaagaatattgggcatattggagcagatatatttactgcaaccgttacgaaccggcaaaatcaaccgtatataccgatttgcttgagcttactaaagaaaaagactatttcgtcatcactactaatgttgaccatcaatttcaaaaatcaggatttgataaacacagattgttttatacacaaggtgattatggattatttcaatgctcggtgccttgtcataataaaacttatgataatgaagatataataaaacaaatgctgaaagaacagaaaaatatgcgcattccaacagatttaatcccatattgcccaaaatgcgggaagccaatgacgatgaatttgaggtctgataatagatttgttgaagatgatggatggcatattgcagcagaaagatattcaaatttcattcgccgtcataaaaatatgaaagtattattctttgagcttggcataggtgaaaatactcctgttattatcaaatatccattttggaatatgacatatgaaaacccaaatgctgtatacgcatgcgtaaatttaaaaaattacatatatcctaacgaaataaaaaaacagtccatttgtataaattcagatatacgaaaagtaattttagacttaaaacactcttagaaatacaacatttacgttataccagtaatagttactattaggtaactacagtacaaaaaagtgcttactttacaaaatacatttatggcaatataatgaaaccggttttaaaactaaatattaaaatagaaaggattgttatttatgaaaatcgcagtagtatgcgcaaatggaaaagttggaaaattagttgtaaaggaagcaatgaaaagaggacttgacgtaacagccatagttagaggagaaaataaatcactggctgagcacacaatcattaaagatctttttgatcttaagaaatcgaatttagatagttttgatacagtagtagacgcttttggaacatggaatccagaaagccttccgcaacatagtacatcattaaaaaagctatgcgatcttttatcagggactaacaagagattaatagtagtcggcggtgccggaagtttatatgttaatcctgaacacacattgcagctgatggatactccggattttcctgatatgtttaaacctcttgcatctaatatgggaaaagcgttagaagaacttcgttcgcgagatgacgtgcgctggacatatattagtccagccggtgatttcagggcagatggtgagaaatgcggaaaatacatattaggcggtgaagagctaacattaaattcaaacggtgaaagtataataagttacgccgattatgctgccgcacttgttgatgaaataataaatggtaatcacataaatgagcgcataagtgttgttagagcataatatcttgtctttaatatatataacggcagcttgactagtgcgtcagactttgactgtttgactgtcattactctgttaacttataattggctttttgagattaaatattgattataatataatgtttgttttatacccaaacattatattttaaaacaaaactataaaattgacattttaaataaactcatatatactaaattcagaggagtgataaaatgtcaagtttatttaagtcaacttttaacagcaggtttctcaacggagataatattccttaccacagatatattcgcagtgatgtccctaataatatcagcaaagacgaaatagattggttatataaaaataattttacaacaatcattgatttgcgctctgattgggaacacgagcatgaatctgtccctcttgaaattgacaacagatttatataccatcacaaacccgttacaatagacggtttagttgatatagataatattaatggtatagttcctaaaactgttgctgatgtatcaaaatcgtatattttgatggctgacaaaaatatgaaaaatataatcaatacaattttaaatgctaaaacaaatgttttatatttttgcagcgcaggcaaataccgaacaggtgttgtttcagctatattaatgctgatatacaaagaaagccgaaacagtatcatagatgattatatgaaatctttagataatatcaaagttatatttgagaaatattctaaagaattccccgatattaatactgatattatatatcctaaaagagaatttatagaatcatttttggataatgtaaatcttaataatataatttaatcatcattacaacttcaataatagaacttttgtaaacttattagaaataaaatcatatattattcaatgaagatttaatgcttatattaaactgcataaaggagaatgatatatgaaacgtttagtaccacttgaaccacaagctgaaaaagtatgcaacgaagcctcaaagccgcctcttatatttcagcttccgcctgaaaaaggccgtgaagtgctggaaaaaatgcaagacagcccagtatacaaatatccggctgaaattaaaagactacaatttgaatctgataactggggaacttttaaaatatattttgttattccaagcaacttacagggaatcccaagcgttatctactatatacatggggctggatgggtatttggtagttttcatacacatgaaaagctggttcgggaacttgcagcaagaaccaattcaattctagtctttcctgaatatagtctttcccctgaagctaagtatcctactgctatcgaacaatgttatgaagccttatgctgtattcccgaactgctgaaacaagaaagtatttcagctgatttaagtaaactcactgtggcgggcgacagcgtcggcggtaatatggcaacggtaatgaccataatggcaaaacatcgaaacggaccatatataaataaacagcttttgtactatcctgttaccaacgcctgcttttcaacagactcttactgcgcctttgctgtaaattattatctatatcgagcaggaatgatgtggttttggaaccaatatacaagcaatcttttagaaagaacacaaattactgcctctcctcttaagagttcgcttaatgaattaaagaatttaccgccagcgatgattttaaacggtgaggcagacgttctgcgagatgatggagaatcttatgcgcgacgtcttagaaaagccggtgtagatgtaactgcagtaagatttcaggcaattattcatgattttgttatgcttaatgctttagaccaaactaaagcatgccgcgcggctatggatctctcgaccgagtggataaaaaagaaaaatgccgaataaaatttaatacacaattcagtacatacaaaaatttgtctaataaaatattagattactatgaaaaatataatataaatcaatattgtttatttcaataattttcatctgcatataatcattttaataaatgtttttctcataacagatattataataattatatatcttaactaaaatataaactgcagtaaaatagatgcgccccgaaaactgaaaaataataactgatgattttaactttacaacaaattcaggtgtgctgttttatgcacacctgaattcttataatatttaattatagaaaaatatattttaaaacttatacttttcatttcagttagtaataaaatattagaactgtttcgctccacaaatcagtgcaacttttaaacgaatcccataaacatgcttttataatatcaaaattaatttcactaacatttattttgtttgtatttccaagtatatcagcttgctttaaatctgttaataccaatcatttgtataaccgcgcaaaatgcttttgtgcctcttgtttagtttacatcatgatatgttatcaatcgctgtctgaagaaccaatatcactgtattcagcatctcttgctccttcttgaacagatgcgtcacaagccagctaaaatcctgcttcaagttgaagatttgcaaaaatcatcattttccaagattaaagttatatagagttatctgcttttatcttatatgttttaaaaataaactgacatttctaccgaataaaatatttcaacatattccgttcgttattaccataaattattttatttgaccatacaagtaacaaaatgtctgcagcttcatttcttaaaatacatactaggttaaaaattattatttaaaagatccatttatataaagcttgcaacaattcagatatagtatgtatattaactttatatcttcataattatcctattaactttaaatcagttctattattttttctatacaatacaaacgatataaataacaggatcaagcacacaagtgctaaaatcacatctgacggtacgctggaaatcagaaataccggtaatgcaaaaataattactataaccatactcataaatactgagatcatagacgtagtactctgctttacaactgcagcctcattttcccaatcaaatatcggaaagatcagatttgaaaaaataccaaatactgttgtaaatataatcaatgccgctggtactagtataagccaaacagcttcaagtattgacggttttacagcaatcattaaaaatatttctgaaagtatataaaatggcgctataactgaaaagttaaccattattttactatcaaaaacagtctttgcttttacgggcagacattttataatccaccattccttaccctctaaagaaattgatactgaagtggtcggcatcaaagccggcatatatcctattacaaacggaagagcttttcttaccattccaggtataggaatcaacgcttcaactttgtctattcccataaccaaaattgcaactgaggccaaagtcatcattacagctcccatcacagtattggatatatagacgcctgatgaaaagtagcgccttaattctctgaaataaagagcttttaatgttgaattagtttttaatttatgaattttataattatgctttgccgttgttgagtataatgtactgcatatcttttgaaaattcaaagacacaataacagccataactaaaaataccgcaaccgaaacgataataaaagtcagtaaaaataatatacttcccgatgtcatcgcttccccaagccaaattgccggcggataaatattattaatctgttcaataataacctgagacaaattttgaagcgtctcagatgaaacattctccatattattagactgcatgctaaatataattatcacagaagcaaacaatatagataaaacagcggtaaccggtcctttatatttcatcttagaagcgatcgctgttactgccgctcccaataatgtagcaacagccattgggagaaacggcagaaaaattattccaaccaaactggtcaaataaaatccaaacccaagacctaagcttattccatagacaacagcccccgttcccattactacaaaagatatcaacaggttatcaaaatacatattaaaaaatcggcttataactacagcagttttagaaatcggcaatgaacataaaacctcatagctgtttttttggaatataacattgcctgatgatactataccgaaaaataatattaacaaacttgttgtcgccgttagtattacgggaacgacatcagccatccccatctgtatatacgtatatgaaaataaactgacatagaatataaacataatgccaatgaatatacgaaaaaacattaaatatattatacgttttttcttttgcttatctttgccaaaacgaatttcatttatcttccaaaaattctttaactgaatttgaaccagttttttaatttgacgaaccatcgctgactacctccataaatactgactcaagtgtctcgccgtctttaacaaactcattcattttacctgataccacaagttcaccattttttattattgcaatcttattacacaacttttcagcaacatctaatacgtgagttgaaaaaaatattgctcctccttcattacaaatgttacgcataatttcttttaaagcaatactggcttttggatcaagccctacaaaaggttcatccaaaatcaataacttgggatggtgaactaaagccgatatgatagctaacttttgtttcattccatgagaatatgataaaaccaaatcgcccagcgacccggttatctcaaaaatctcagaatattcgcgtattcttttttcccgaacatctgccggaactttaaaaacatcagcaataaaattcagatactgaattccggttaaatattcatatatatcaggattatcaggtatataagcaatcttagatttacaccgtataggattttctttcactgaaactccgtcaattaatatctcaccttcatcaaaatcatgtataccaaccacacactttattgtagtggtcttacctgccccgttatgtcctataaatccataaatatcgccggaactgatttctatatttaaattagacaccgccttttttccgcctttataagttttgcttaaattattaatttttaacataacttttctccttatttaaagttgacctaatccaatttactgtctatttctatatttgtattttcagacataaccagttgttcaaaatattccatcggaaacggcagcaatgacaatggtttaacagcaatagacaataattttactatattatcatcagccgcaattctatttgaattgatttttccgcaaattctgcatctatgtataattgcccattctccattatcgcgtgtccatacactgataggttccattattcccccgcagttagcttttctatctccgggaatattatctaagtgtatactcatcaaacatttaggacagtgattacggttttttgttccgcatccgtcaatcggtactaactgaccacagtttttacaagtaaaacttcttttattattttttctattcaaattaattcctcctaaaagttacttcaataacttcgggaggttatgcagagatttattttatgcaaacctcccggcttgctgcaatctccaatttaccatatttatacataaatttctccttattaaaaacattataattttttgattcacactatatttgacatttaggacagtaataaactgtcccgcctaaatatgattctttagttatctcacttccgcatatagagcagccatttttataggtgttttttgaaagctttgttttatatcttccaggacttccaaaaatatctttttccgtatcacgaccgccatgttcagtcatatccagcaaaacagattttattgagttaaaaatgttttttatatcttcttcactcaattcagagattttgtgtcttggtcttaaacgagcttcaaataatatgtcctgcagtactccattacctagaccaacaaatctttgttctgtcgccaaaaaggcttttaaactcagcgacggtttcaccgaactaagtatatttttaaaatactgataactaaattcatcaccaataattgaaatactcttcttgccgcttatataataatcattatcataatctccgttatgacatatgattccaccatacattgctactgtaaaaatcaaagcacatccgtcttcaaaatcaataatcaattgatattttgatggacgcttttcacctggagtaagcaaacgcagatttacaccatcgttataacataatcttttttcatcagaaaaaactatttcaacaaatattccaacattatttacagcaattactttttttcctgttaaaatatcattatatgattcaacttcgccattaaaccagcaaaatttgtgaggtgaagacggaggtataactgatttaaccattttaccaactatgttttcatttaactcacgtactcttgacaaaacttccggtaattccaacacattatccactccctttataaattcactttatacccataaatcctgcttgcatacctgatatccatatagtttcatatttattgaaaccgcacttctttaatatgtcaagctgacttgaaatagttatcggataataatttactccataacggttaatgtgactttcagcctcattctcgctctttccattattaatttgatattttttccaccttttaagctgcattgatttaccaaaaccggtattcggagcaaaattttcaaaagaaaataatactcctcctttttttaatgctttataacagtttaggattacacgttccctgacagttttgttaaaataatgattaaccataattgatgtaacaatatcatatttatcacaaaattcaatttcttcagcagacatcagaaaaaacctattatttttatttttaaatctttctcttgttatatttaacatttcttcagaaacatcacaaaatgcgaattcattaatattaaaataattataagctgcttcagccattttcccggtgccgcatccaatatcaagccaatctatatctttaaattctaatacatcaacaatatcaataatctgtttaaaaaactcattatagtatggtactgttttttctactttatcattatattcaaacgcatcaaacgcagcgttgtaagtcggcatagatttaacctcacaaattctaaaattcgttttataacatctcattttattcagaatataaaaagctatttgcttataaaaaatatacttgtttataaaacaagacataaaaacaattatgtcgataattttacttattgtacttcattaacatagtaaagtcaacatataataaacacaatttatataaattttatatatcagcaaacgttaatattgaaatagaaaaaaatttgttgtataatattttttataccgcataccaattaagtgatatcgatttattatccaataagtcattggaggatataatatgaaaaatttttatatgattggcggaactatgggaattggtaaaacttcaacttgtaaatttttaaaaaacaagctcccaaactcagtatttttagatggagactggtgttgggatatgaacccatttcagataaataatgagacaaaaagtatggtaatgaaaaatatatgttatatgcttaacaactttttaaaatgttcgtgctatgataatattattttctgctgggttatgcacaagcaagaaattataaatagtatcttagaaactcttgatttatctgaagtcaagctgcatttaatttctttagtctgtgaacgtcaaacgttatatgatagattaatgtctgatgttgccgccggaataagaaacacggatgtgatttttagaagcattgagtatcttcctcttttttataaattaaatacagatttgcttgatgtaaccgacgtttcacctgaacaagccgcaaacttaatacgaaataattactagataaaaggagaaaacaagtaaatgaaaataatagtaaacaaatatgaaaaaaaagatattaatgaaatgaaaaatatatggaatgaggtcgttagagatggtaacgcatttccgcaaattgaagaattaacagaagtatccgctgccaatttttttgatgaacagagcttttgcggtgttgcaaaagattctgaatcaaatataatagtagggttatatatacttcacccaaataatgttggaagatgcgggcatataagtaatgccagctttgcagtaagttcatctgtcagaggatatggggttggtgaaatattagtaaaacactgcatagaacaagcaagaaaattaggctttaaaatattacaatttaacgcggtggtaaaatcaaatactgccgctctgaaattatataaaaaattaggatttattcagcttggaattatacctaatggttttcttctgccaaatggcacctatgaagatataatccctcactacatatcactataataattattgtaaagtaaattttcatttgttaagaaagcttataacgatactaaataactcggcttttctaaaaagcttcaaaccaacacagattattatagataaccgggtagactgcaatattgcacaacctatataaaaataaaagacaaacttgctcaaattagtcatgaagtttgacaccgttactatctcagatagcggtccacgcgcatggctgtcttttaaacggatattatatgagccaaacaaaaaacgctttcttttttttaagaaagcgttcactttacaaataacctatttttaattgattttacaaatcttcattatttatcatagaatcaatttcattaaaagacctttcagctaccatttcagcttttttctttttatctttcacccttactcccaaatctgatattattccataattaatattcataggctgaaaatttgttatactgctgttagacacatagtttgacaatgcaccaatcgcagtatcagctgaaaatggttttaaatctttgcccattattctctttgcggcataaatacctgcaagcaatccgcttgcagctgattcaacatatccttctacacctgttatctgacccgcaaaaaacattttttcattctctctcattgaataaaacttatcaagcgcacaaggcgagtttatataagtatttctatgcataactccgtaccggacaaattcagcattttcaagtcccggaatcatactaaagacgcgtttttgttcaccaaactttaaatgagtttgaaatccaactatattaaacatactatgcgccgcattatcctgtctaagctgcacaacggcataaggcttatcctcacaatgtggatttttcagtcccacaggctttagcggtccaaaacgcattgtatcctctccgcgttttgccataacctcgataggcatacacccctcaaaaacctttggattttctacgttctcatgaacctctgcagtttcagctgaaatcaaagcattataaaattttatatattcttctttagtcataggacaattaatataatcagcgccgcccttgtcatatcttgcagctttaaaggctttagacatatctatactttcatagctgactattggcgcggcagcgtcataaaaatgcagatactcctgaccaataaatctgtgaatttcttcagccaaaacctctgacactaaaggacctgccgctacaatcgtatattcatccgggttcagtttatcaacttctttttcaataattgttatctttggattttccttaatcttctttgtaactgcggcagaaaatccctccctgtccacagccaacgcacctcctgcaggaactttagtttcatccgcacacaccataataagtgaatttaatttacgcatttcttcttttaaaagaccaacagcattatatattccatcagcacgcaaagagttactgcacaccaactcagcaaaattactgtttttatgagcaggagaatattttttaggcttcatctcataaagctcaacgtctattcctaaattagctgcctgccatgcggcttcacaaccggctaacccggctccgattacttttaatttcatatcaaacctcaaactgacatattttttatttctcagatttcttttttttagactccggctttctgacatagtcacagtcctcattataacatacaaagctcaaaggtccattttttctgaacgcgtgttttttcataagtatgcttccgcattttggacacttttcatcactaggctcatcccaggaaataaaatcacactcgggcgaatgctcacaagcataaaatgtcgccccctttttagacttgcgtatcaaaaccttaccgccgcatttgggacacggaactccaagttcaacagttatcgccttagtatttctacattcaggaaaaccgggacatgctaaaaattttccaaacttaccttgtttatacaccatttttctgccgcacttctcgcatactacgtcagattcctcatcttttaactcaatatcgcctattttttcttctgcttctttaagagtcttttcaaacggatcataaaaatctcttataacttctttccagttggtagagccgtcggcgacatcctctattttgtcttccatattagccgtaaatttagtattaactatatccttaaaattttctttcatcaaatcagtcactatatatccaagttctgtcggaaacagcgtctttttttccctagcaacataacctctagcagtaatcgtagcaattgttggagcataagtactcggacgaccaatgccttcttcctccattgcttttacaatagacgcctccgtatatcgaggcggcggctgggtgaaatgttgttccggcttaagttcagaaagttttaattcctgtccctctgtcaaaaccggcagtttttttgctttttcctcttcagtatccttgccttcaacatacagagtagtaaaaccggcaaatttaacagtgcttccgctggcttttaacatatacttatcagtggttatttcagcgctgactgtatccattattgcgtcagacatctgacttgccataaaacgctgccaaatcaatctataaagtttaaactggtcaggtttaaatgtatctttatatttttcaggagaattagccgcataagtaggacgtattgcttcatgtgcgtcctgtgcagattttttagccttatactgtcttggcgcagacggaataaatttatcaccaaacttttgtgaaatataagaacgcgcctcattttgagccactgtggcgattcttaaagagtcagttctcatataagttataaagcccatctcgtaaagctgctgtgccgccatcatagttcttctggccgtaaaattcagctttcttgaagcttcctgctgcatagtactggttgtaaaaggaggtgaaggacgacgctttgtttccttttttattattttggacacagcatagtcggaagttttgagttcttttacaattttatcagtgtcctcaccattttccaacggaatctttttaccatccctagagccataaaaccttgcaataaacggcagttttccactaacatttgtaagtttagcgtctattgaccaatattctgttggttcaaatgcgtcaatctcacgttcgcggtcaacaatcattctagttacaaccgattgcacgcgtccggcgcttaaacctttttttatttttttccaaagcagaggacttatttgatatcctacgattctgtcaagtacacggcgcgtctgttgagcgtccaccaaatccatatctatacctctggcttctttaaccgcttctttaaccgcatcctttgtaacttcattaaaagttattctgcacggactcttaggatcaatatccaaaatatttgccaaatgccatgaaatggcttctccctctcggtcagggtcagttgcaagataaactttttcggccgatttagcctttttctttaattttgctattaaatctcccttgcctcttatagttatatatctaggttcaaagtcattatctatatcaactccgagctggctctttggcaagtcgcgcaaatgtcccattgttgcctctatattatatgaacttcccaaatactttttaacactgtcaacttttgttggagactcaactataaccagcttcttcttttttgcagaagacttggttttttttgtagaagtttttctcttttccgccataattttcctccgttatatactaagtgaataaagatttccggcgtgctgtaacacggcgcctttcatttgaagtataagtattgtactgcttacctcagatgacctcatacctgtgtttctcataatctcatcaatatgcgccggttcaatacacttatataaatattctaaaatccgctgttctgagttatcaaagtctttaaagtccggttttttatacggctcaataacggcgggctgttttccttttataactgaacctatctgaatttgatttctattctctttttttgttttctctttctcgattttggttatctcatattcatcttcatctatgccatccaggttgtttaaccgaacagcactgccaatacaatctaagccattatccattaaatcagcaaatctgtcattatattctgataatatatcctcagctgaagtagtgactattgctccaactttcaaaagcgaattgggcacataagaattgtaatctgtaggacgtccgggaactgcaaatacatctctgtcatattcctgtgcataatttgcggttattgaggtaccgcttcttatatgcccttcaacaataacagttccataagacaatcccgatataattctatttctttcctgataatattcagctccgcccaaatcctcaggcggacgttcagaaataataattccattatttaatatttcataatataaattttcattctgcggaggataaattgtatctactcctcccgctaatactgcaattgttttttgtccggcttcaagagctccggaatgagcagccgcgtcaagtccaattgccattccgctaacaactattattccttctcttgccaaattaaaacataactttttagtaaatttaacgctatctttattacagcgccttgttccgacaactgaaagcgttaaataatcatttagattgagattatcgcccttcatatacaaaatctgaggaggaacatcagtattctttaacagtattggataatcaggttcggatatatgtattattctaatattatttctattacaataaccataaatttcttcagcagatttcaaatccttctttttccattctgaaaatctataacccaaaatatttttaagttttctttcatcaaaatttccattataaatttcttccgctgttccgatatgagatacgcaatcatgtatcaacttaggagaatgttcacagacgcaatttagccatatacactttaatatttttgactcatccataaaaacactcctaaaaatttatattataaaaaattatagcaaatacatcagtataccggcggcaatagcagcattaagagattctacttttcccctcataggtattcttactcttatatcagacatatttaaaacttcctctgatacaccaaaagcttcgcttccaacaacaatagcagtcttaatagactcgtctgctcctttgtcggtaatataccggtaaatatccacactgttttctaagcatgaacaaataattttaaatccgtgtttcttcacatcatttaatatttccgcgttgtccgcaaatacaaattcagttctgaatattgaccccatagtcgagcgaactaccttgggattatatatatcagcgcatccctttaataagtatattaattcaataccggctgcctcagctgttctaattatagtgcccaaatttccgggttcagaaataccgtcgagaattaatattttattaatatcattcaattcagatttcttaacagataagtttttaattgacacagcggcagcaattccttgtggattcattgtgtctacactttctttaaacagcttatcactgacagtatagacagaaataccgctctcgtcaagacttgtaaccaaatctttattttcagaactaaaattttcacttataataatgaacataatagcgtctctgacatattcaaacgcctctaaaaccatacgttttccctctacaagataggcgttattttttatacgtccttttttagcggaaagtgaagatattagttttattttcttattttctttggcagtaatgctttcaatcataaactactcccttagatctataaacttctgaatatagcaaaagttatactcaactttgagtataactttaaatttaactattttaccttttctaccagcttagtgaaagcagccggatcagatattgctatctcagacaacatctttctgttaatatttatattgttctttttaagaccattcataaacttgctgtaactaataccattcattctagcagcagcatttatacgggcaatccataattgtctgaactccctcttctttgcttttctgtctctataagcgtatgaaagcgacttcataaccgcctgattagctgtcttaaacagcttactcttagcacctctgtatcctttagcaagcttcaggattttcttacgtcttgcacgagtcttaactgcaccttttattctagccatagtaattttcctttccgaattttcaaaataatgtaattatcaaatcataaataaaccgtattaagatttatttgtaaggtatcatgccttttattgtagcggcattagcctttgacaggtaacccatttttctgagctttctttttctcttcgtagtcttcttattaagaatgtgacttctgtaagcttttcctctttttaccttgccgttttttgtaataccgaaacgctttgctgcgcctctgtgagtcttaattttaggcattgttttttctccttccgttttcgtatgaaaatatgttctaaagcatattatgcattataattaattcttcttcggtgtaataaacatagccatgtttctgccttccatctttattcctttatcaacgcttccatattcctcaatagcgtccttaaacttcataagcatatctctgcctaaagatgaatgtgtgatttcacgacctctgaacctaactgaaactttaactttgtcaccgttttgcagaaacttaatacccgccttgactttagtgttaaagtcatgctcatcgatatttgaacttagtcttacttccttaaccgccacaactttttgatttttacggttttccttttcacgttttgcaagctcaaacttatgcttgccgtaatccataatcttacataccggcggttttgcctgcggagcaattttaaccaaatcaaggtttttctcgtctgcaagttccaaagcacgtgcagatgatactataccaagctgttcaccctcaggtccaacaagacgaacctctttgtctctgatttcgtcgttaatcatcaaatcttgcctagctatataaaacacctccaaaataatttaaaaatttgcataaaaaatgcgaagtacaaaagtacaccgcaatatccataaaatatttatctgtaataatcggatacccttttgcttttcgctaaggggagaagcggcacttctgctttactaaaaaatattaccacattatttttaatatgtcaagcattttttcaaaaattattatatttatttatttttactaatatttatacttaagcaatcaacctattaaaaaattcttgtattattttaccaattatgctataataatgtcgtatttaatatgctggagggttcagtatgaaaaacgccattttatattataattctataaaaaataaatttatctttagaaaaattattgagtctaatatacaacgcttacttaaatcaacattatataagatttgtattcttattttacctatatttttatcacttgtcaaccccgcgtttgctgaaacaacaaccagcgatattattctttatctaaatgggaacatattttattcatcatgtcctataatagtagaaaacggaactgctcttgcacctttcagagaaatagccgatacctttggcgcatccactagctgggattcttcatctgaaaccataacctcaactttaaatgaagttacagttcaatttaaaattggaagcaatgtaatgataaaatatggcaagccggtagaaatgggagccgaaacatgttattatggcaacacagctatggttcctgtcaaagctataggcgacgcttttggttatccggttacatgggacgagtgtaacagagtgatattcttgggtgatgttgtaaatataaataataatcccatgaacgatataaaaataactgatgattttagatataatgattatatcggcgaatacagcggcgtaagtatattttcaaatggaaatgaaaactttggtatggaattgctgggtataaatgattattggggaagttcctatgctgaaacaatagcaaaaattgctgattgtgttccatatgcaaatgtgtataatataattgttcctactgctcaggaattttacgcgtctaacagcaagaagaccaatcagacagcagcaatatcagacgtatatgaacacataattcaatacaacaaaaagaatctgaaaccaataaacatcgttcagacattgtctgaccatgctgctgaaaaaatatacttctgcacagaccatcactggacgcaaagaggggcctattatgcttatcaaaagtatgctttagaaaataagtcaatttcagaaattgatcctttaaacacatttgaggtacagaacatatacggttactatggttcactatgttctttcacttccggaacgtatggaaatcaactgctcgctcaaaatcctgacatgcttcagttattttcgcctaaatcatccagcgagggggctgcttaccgcgatccgtttatgcgttcatatatacaaagtataaaagtgatttaccctcctgccaaaagctacagctgctttatcgaaggcgattatcctcttgaggtatttaaaacaaacgtaaacaacggaaaaaagatttgtataataaaagattcgtttggagacgcattcgcaacctgggctgtaaataactatgaagaagtatatgttattgattacagaatgtttaatggaggaacctacggagactatggaagcggcaaaaatgattttaaaataagtgacttctataattttgtcaagtttgacgacttagttataataagctatccagtaacagtttcaaccggttcatctgttcagcttctaacaaaaatggtaaattaaatatataagattggagaataaaaatggttcatataggtaacgactgggacgatcttctgagtgaagagattcaaaaagaatactacttaaaattgagggcctttcttgcaaaagaatataaaacaggcactatatatcctgatatgtacgatatttttaacgcgttaaaattgacaccatataatgatgtaaaagttgttattataggtcaagacccttatcacggacaaggacaggcacacggtctgtgtttttcagttctgccgggtgtaacacctcctccatcactggtaaatatatataaagaaattcagtcggaatatggaacagaaccacctaaaaacggtgatttaactcggtgggctaaacaaggggtattgttgttgaatacagttttgacagtaagggctggtatggctaattcccaccgcggaatgggctgggaaatatttactgataaaattattcagcttttaaataaacgcgaaaaacctatagtgtttattttatggggaggaaacgcaaaaagaaaacaaagtcttattacaaatcctaaccatttagtgctcactgcagcccatccaagcccactttcagcttacaatggatttttcggctgcggacattttaggaaatgtaatgattttttaatatccacaaatcaggaaccaattgaatggtgattataataactaacaagaataaaatttacagttatttcataaattctcattgtaaactttaaaaatgtatgttaaaatatttttaaatataaaaatgaggtgtttttatgaattttaaaactggtataaaattagcatctataactatggcagcagtgataggcacagtttcattaactgcatgttcaattccagggtttaagtcttcaccgactccgtcgcctgcttctgctcaaacaactgcggaacaagcaacaaagacccctgaagaagaaattgtaggcgaatggaaaatcgaatctatacttgataagagtggtaataccgtttcgttatcagacgttgatttaaccggaacccctttggaggaaatgtccggagtaataggtatggtattaaaaaccggagttactttaaattttaaagctgataaaacagtatctttttcagttttaagcggcaattatgaaataaacgacaataagcttacgctttcagttccgcaagtttcaaaatcaattgaattatcttattcaattgataataatgacatgaaagttaaaatagattcttattctattaaccttaaaagacaataatacaaaatggatatccgagtttcagcactcggatatccattttgactacctgagctatttacagatgtaaatagcttttttgtgataaatgtatagttcaattttttgtttctaatttaacctaagctttcctaaaatcgaaaataatatgaaaattccaatatttataacaactactgtcgcaccggtaggtgtagagaaaaaataagaaattataagtcctaaaagaaaacaaataatagaaattactgctgaaactataacaacagttttaaaatgcttacatactctcatagaagttaaagccgggaaaatgataagactagaaataagcagtgctcccatcattctcattcctagaactatggttatcgccgtcaaaatagcaatcagcatattatatacatttgccctgatacctgttgcatttgaaaatgtttcatcaaaggtaacagcaaaaatcttattataaaacaaaacaaacagtactattacaactgctgacaaaacaacgcttaacagaacgtcatttaaggtcatagccaatatactgccgaaaagatagctgtttatatcagtattcatacccgttgtcatagatgcaacaagtattccgaatgcaagtgcacccgtagaaattatagctattgcgctgtcacctttaatactgctgttttcgcttagccgaagaagcaaaaatgcggcaataataactacaggaatagtaaattccatgggagcccaattaaacgctgtagctaccgcaatagctccaaaccccacatggcttagtccatcaccaatcattgagtatcttttcaaaaccaaactaactcccaaaagagatgcgcataaagacaccaaaacacccactatcaaggctcttagtataaatgaataagaaaacataatatgtaatgtttcaatcatgtttatgacctccaacaaactcaattcctatcttagaccgtgagtattctttggacggtccgtcaaacataacgtttccgtcttctaaatgcagaatccggtttgaatatttaactgcacaatgaatatcatgggataccattacaatagttataccattactgtgcatttcgtttattatattaaaaaactcagttgtaacaaccggatccaagccggttacaggctcgtccaaaaataatatttttcttgtggcacacatagcgcgcgcaagcaaaactctctgctgctgtccaccgctcaattcacgaaaacatttagactttatattggcaatgcccaacagttccattttttccaaggcaagctttttatcagataatgaataaaaaggtttaaaaactcctccttttaaacatcctgacaaaaccacttcattaacagaagcaggaaaatctttctgaaccggcgtctgctgagccaaataaccaatatcagactgcacaagcccgtcaccgtattctatactgccgctttctgttgattttagatgcagtaaggccttcaaaagtgtactttttccgctaccgttacgacctattatactatagtagtcacctttatttatttcaaaagatatgttatttgctactaaaagtccatcataactcaaactcacatttttacacttaattaatgacacaaaatcaactcccaatacaaattttgttaagtcatttttctcttaaataaatttaaagattagcgaaacaaatttacacgctgaacagattgtgttctgaagtatatttgtccgctaatctaaattttatattactatgcagttttaggtctcttttttgaacttttttgttcagtaataattttaggagaaccctttttcaaaacactgtcacgtgttataataacatttttagcgtcaggcattgaaggaatctcatacattatatccagcataatatcctcaacaattgtccttagacctctggctccagtctcacgctcaactgctctcttagctatttcctcaactgcgtcatcctcaaagtcaagttcaacgccgtccattttcatcaaagtcttatactgtttcaaaagcgcattcttcggctcgctgaaaatctgcttcaaagcttcaagatttaaagtatcaagagttgtaattattggcagtctgccgataagctccggtattagtccatatttaactaaatcctccggggctatctcctttagaatatctccgcggttacgctcctttttgctttcaactttggcgccaaagccaagagttttatcagatacgcgagcttcgattattttctccagcccttcaaatgctcctccgcaaataaacaatatatttgtagtatctatctgaataaagtcctgatgcggatgctttcttcctccattaggaggaacattagctaccgttccctcaagtattttaagcaaggtctgctgtacgccctcgccgctaacatccctggttatagaaggattttcagattttcgggaaatcttatcaacctcatcaatatatactatacctttctcagcaagagcgatgtcataatctgcttcctgaatcagcttaagcaaaatattttcaacatcttctccaacatagccagcttctgtaagtgaagtggcgtcagcaattacaaatggcacatttaaacgttttgccatagtttgagcaaggaaagtttttcccgagcctgttggtcctatcattaaaatattgcttttctgaagatcaacatctccgctgtctgaatcggtgccaattcttttataatggttatatatagcaactgataaagctttttttgcttcatcctgacctataatataatcatttaaaaattcatgaagttcttttggttttggtaattcttccaaactttcaatctttttattgttttcattttccgtctcaacgtccatttccattatatcaatgcaaaggtcaacgcattcgttgcaaatatttgcagccggcccttgaatcaattttttaacctgactgcggcttttgccgcaaaatgaacacctttcctggttgtcggtgctgctttcagacatacacaatcctccaataataaaatttaacgtttagtaactatattgtcaataagtccgtattttaatgcttcttcagcatccataaaattatctctttctgtgtcttgcttaacaatatcaatcggctgaccggtattctcacttaaaatcttattcaagttttcttttattttgagcattctctcaacatgaatcttcatgtctgtcgtttgcccctgaacaccgccgagaggctgatgtatcataatctcactgttaggaagtgcaaatctttttccttttgcacccgatgaaagcaggaatgctcccattgatgcagccattccaacacagatagtagaaacatccgcttttgtatactgcatagtatcataaattgccatacctgctgtcacagaaccaccggggctgttaatataaagattaatatccttatccggatcttcgctatctaaaaacagaagctgggcaacaactaaacttgctgtagcgtcattaacttcatctgacaaaaaaattattctatctttaagcaatctggaaaaaatatcataagaccgctcaccatgacctgtttgttcaactacgtatggaactaaactgctgtttctaataattttactatccatatgattacctccaataaaaaaaatatgttaataattaatgatacaataaggctgatttgaaaataatccaaatcaaccttaattctatgttatttaatatagagtattactcaaaatcagcgctctcaaccaaaagattaattgctttttctgcctttattctagctttaacgtcatcttcttttatatatttcttaatgtcgtcaatcttcatgccgttttcttcactaatcttttgatattcgttttcaacgtcttcatctgtaggttctattttttcaacttcagaaaccttttcaagaaccagcgtagtcttaacacgcttctcagcctcaggcttatactgctcgcggattgtatccatagtctgacctgtatactgcatataagtatttaagtcgattccctgataacgcatctgcatatccatatcgcgaatcatactgtcaatttgcgagtcaatcatctcatcaggaatatcaatttctgtgtttgcacacacagcgtctataacattctgttcagtctcatgctttgctttatcttcattagccttttcaagctttgcctttatatcagccttatattcgtcaagagtatcaaattcactgacatccattgcaaaatcgtcatctgcttcaggaagttctttaacctttaaagagttgattttaactttaaacacagcgtcttttccagctaaatcctcagcatgatactcctcagggaacgtcactttaacttcaacatcatctccaacattcttacctagcaattgatcctcaaatccgggaatgaactgaccagatccaattgtcaaatcaaagttttcacccttaccgccctcaaatgcaacgtcatcaacaaagccctcaaaatcaatgttagcgatatcatcagcctgaacagctctgtcttccacaggaacgagtctggaatttctttctcttaacttttctatttcttcattaacattttcatcagttgtttcataaacagctttttcagcttttacacccttatattcgccgagctcaaattcaggtttaactacaaccttagctgtaaagataatttctttgtccggctcaatcttttcactctttaaatcaacttcaggctgagctaccggagaaattccgttttcttccaccgctttatcatatgcgtctggaagaacaaagttaatagcatcttcataaaaaacttcttttccataggctttttcgatgataatcctaggtgcttttccttttctgaatccaggcatgttaatcttcttaacatttttcttataagccttttgaaccgctttttcaaattcctcaggtgaaactgagaattcaaaactaacaatattcttatccgttttttctacattacccataaaaaatacctcactatgttaaatttctgtctaacgcatttaatgattataacatataagaattgaatagacaagtactttcaaaaaaaattatatgttacttttaacaaattttacacaagttttggaataaaattcaagaaatcacacgaaaccaacgataaattgacaccattcacatcaccttgtcttgcaaatttttgtgcagcagcatgcagatgtccatatatacatttttttactccatattctttcattatatcaataaactctaaattttgacctcctatttcgacaggaggataatgcatcgcaactataatttcttcagaattattcctctttgcgtcttccaaagagagaatcaatctttgtttctctctcaaaaaaattcttttatcctcttcacttgaattttctccggctatattccagccccttgtaccgcatatagcagttctcccatacatgaaagcattgttatgaataaactttattgtattaaaatcttttcgttctaaaaaattatttagtttattcatagttgtccaccaataatcatgattgcctttcaaaatcacttttgttccatttaagttattaatatattcaaagtcagcgacagaatcgtctaaatatgtagcccatgaaatatcaccgggcataatgacaatatcatcggccccaacaatcttctgccaattgctctgcattctttcaacgtaattacgccagcgttctccaaaaacatccattggcttatccacactaagcggcagatgcaagtctgaaattgcaaaaattgccattttatcacctctgtcacatgaatattttaaatttaagaatataattttataacccggaaataataatactgtacaacgaaaggaggaattatcatggacaataataaaatcgtttgcaaggtaaaaaactgtgagtatcatacaagcggagatctttgcacagcttcccaaattgaggtgggtggcggtacaaagtgctgcagctcatgtgatacagaatgtataacatttaaaccctgcgaataattcctattcattaggtaaggttttgaataataatatattattatcataaccaaacttctaaattctataaaaacgaatcaacggctgtctcaattgagacagccttcttttatttaatatttaaagcttttttaattgacttatacatttcgtctgcgtctattatttcatcaaaccgaatttcttttccgttaagtgcagccaaagactccggtatttccatttcgctcttctctttcaataaatccaaaagctcaaactcatttttatcatatggttcaatccccagagcagataatactgctgcattgaacttaaatggacttgccgtagacgctataatcgtttttgtcatatcacctgtttctgtaacatattgcttatacacgtcaacagcaacagctgtgtgagtgtcgagtgtataaccatcctcagcaaatgttttccagatttgaacttttgtaaaataatcatcacagcagccgccccaaaataacttagttattttgttatgcatagtttttgtaagtctatactctccgccagctgacagcttattcattaagtcatttatctttttatcgtcatttcctgaaatatcaaacaatagtctttccaaattgcttgaaataaggatatccatagaaggcgaaacgctttgataaaattccctgtttttgttgtatacaccagttttaataaaatctgtcagaacatcgtttttatttgatgcgcaaatcagtttattaaccggaagtcccatttttcttgcatagtatgcggcaagtatattaccaaagttgcctgttggaacgcatacatttattttatcaccattctgtatctctccgccttcaaccatatcacagtaagcagaaaaatagtacacaatctgcggaaccaatcttccccaattgatagagttagcagatgagaatgcaaaaccattcttttctaactcgtcgcttatctcagaattagtaaatatctttttaactccagtttgcgcatcatcaaaattaccgcttataccttcaacgcatacatttcttccatcctgcgtaatcatctgcagcttttgaatatcgcttacgccttcacttggatagaaaacaataattttagttccgtcaacgtccttaaagccttctaaagcagcttttcccgtatcgcccgatgtagcaaccaaaataactattgttttgtcctcgcctgtctttttcatggcagtagtcataaaatgaggcagaatttgcagagccatatctttaaatgcgcatgtgggtccatgccataactctaaaatatactcaatgtcatttattttaacaacaggagcaaccttctcactgctgaactttccgtctccataagctccctcagtgcatttctcaatttccgacttagtaaaatcagttaaaaacttagataaaataaaattagctctttcaatatatgttttaccaagcagactctcaatatccgctttttttatttttggaaattcgtccggaacaaacaatccgccgtcatcagaaagccccttttttatagcttcggcagaagtaagttttacgtttttgttcctcgtactgatataattcattttcatcaaacctttcaaaagatttatttcaacaataaaatagaggctgtgtttatatcacagcctctatacaatatcataaaaattaacttaagtcaatattttaactttaattatatgattaaaaatatatcttaacaatctcaactcattttaaataattatattacaattaaacaatatatttcttaacgttagcaccagctgaatcagcctcagcgcttaccatcatagtaaacgaaacgttaaatgcgccggccagcttttctaaatcactgataaattcttcaatagaattcatatcaccgtttggaacacttttgaaaacactgtcaataaatatatgagtaatatcataatcctgagctatcaaaccacatattaaaccttcaaacatatcaaagtttttaatattaaaatcctcagtattaatcattctaacttttctgtcaatatcatgaatcaaacggtttccgtctgtgatacaaacaacattgccattttctatattaacagcattattaacggcttcaatgagtttttttgtctttccgctgccctttaatccaatatgtatcttaatcataataattaccgcctttccattctaggattttaattaaaatccaaaacctgaccaatcgtctaatcaatcaaagtttggataaatattattttattcttaaagatattttaacatatatattcaaaatatacaagacttattttaaaaatatttataaatttaataaatttgctactttaatcttgattcaagcttctctttgtctgcttcatatcccggtttgcccaaaagagcaaacatatttttcttgtagctctcaactcccggctggttaaatgggtttactccaagtaaatatccgcttataccgcaggctttttcaaagaaatataccaattgaccaaatgtatattcgtccagcgattcaagttcaataacaaggtttggaaccccgccgtcggtatgcgccaaaagagtaccttcaaaagcttttttgtttacataatccatagttttgcctgcaaggaaattaagaccgtctacattatcactgtcttcagttatttctatatcgctttttggatttttaacatatagcactgtttcaaaaatctgtctcataccgtcttgtatgtactgccccatagaatgcaaatctgttgaaaaacatgctccggccgggaaaatacctttttgatcctttccctcgctttcaccatacagctgtttccaccactcaataaagtattgaagctcaggctcataatttaccagcatttctatattttttcctttttggtgtaaaatattccttatagctgcatactgataacattcattttctttaagagaaggttttgaatacatttcacgcgcgtcagcagctccctgcatcatttcatcaatatcagcgcccgatacagcaatcggaagcaaacctacagctgtcaaaactgaatatcttcctccaacatcatcaggcacgacaaaagtttcgtatccttcttcgtcagtcaaattttttaatgctcctcttgctttgtctgtggttgcataaatacgttctttagcgccttcttttccatatttattttcaagatagttttttaaaattctaaaagcaatagcgggttctgtagtagttccggatttggaaataatatttaccgacacatccttatcttctattgtttttaaaattccatttaaataatttggactaatattattaccgcaaaaaataatctgaggtttttgattaaaattataaaacggaccgcctaaaaactcgcaggcagctttagcacccaaatatgaaccgccaattcctactacgagcaaaacatcgctgtcatttctaattttatgagctgccgattttattctgctgaactcttccttatcataatctacaggcaggtcaatccagcccaaataatcattgcctgctccggttttactcatcaaaaccttatctacagcctctatctgcgactgcatattatcaacttcttcctgagaaaagaagccgagagctcttcgataattaaatacaacattttttttcatatctatttgctcctttatattagtataaaatttaattatatttactaataaatattttaccatattagtaaattttgtgcaatacctattattgaaaataaaaaaagtttttttagggaataatgtttaatgtgatttaattcaaatgaaatcgacatggatttttatatatttaaaaataaataataataaattttcatcagttaatttcattattagtattaacatgtaaaagatgatttattttaaccataatttacttgtataataaacaataaataatcacaaaatactattgcaacacagaaaaaaataaggagtgaaaacaaaatgtcagattcaaatagctcaaataacttggtagttccacaggcaaaagctgctatggaacagttcaagatggaagcagcatcagaagttggtgtaacactcaacaagggttacaacggagatttaacatctagacaggccggaagtatcggtggacagatggttaagaagatgattcagaagtatgagcaggatatcgcgaacagccaacagggctaagaaaacggtaaatcctatcttttggaaatttattcaaacatcagaagaagatagcgtaaaatataactagttggcgcagtttattagctttcctgatttataataaattttcaaaataagcgtcaaagtttaagaggaagccgaatcggcttcctcttttgctatctaattttcatcgtgatgactatgtccgcagccgcagctatctgatttaacatgttttttatattgatgatcaggtgtaataatactgtctatttttatctcctgataatcctttccgctctctatacactttccacagttatcacacagcttcataggattaaggtcacagtaatcacattcaccgcagccggtacaaattctgtcatacagcacgcattgtcttcccatcagctcacatcctctattaaatagattttaaatcaaacaaactcgtctgctgcttttaatacgcctatttttgcgctgtcgtagattactccgccctgcatataggcaatataaggttcacaaatcggagcgtcagctgacagttcaatggatgcgccctgaacaaatgctccggcagccattataacaggattttcgtatcccggcatatcccacggctcaggtgtaacaaaactatcaataggcgagcctttctgaattgcctgacaaaatttaataacattatccggcgtttttagtttaactgcctgaataatatcgcttctggcagaattaacctccggacatacttcaaatcccagctctttaaacatggcagcgcaaagcactgctgtttttatgctctcagagacaatatgaggagccataaatagaccctggaacatgtttctgttcatgccaagactggctccaacatgtttgccaagaccgggagctgtcaaacggtaacctacttttcttacacattcagctgtgccggcaatataaccgccgcttaacgccaaacttccacctgcgttttttatcagcgagccaacaatcaaatccgcaccaaattcagtcggttccttagtttcgacaaatataccgtaacaattatcaacaatacaaattgtttccgggctaacatgctttacagttttaattatatttccgatttcttcaacggtcagcgaatcacgccaatcatatccccgtgaacgctgtatcaagacagctttgattttttcagattttaatagttctattatactatcataatcaattttattttgatcagttaaatcaacctgacgatatgagactccataatcttttaaagatcccatatcatcataatcgccttcacggattcctattacctcttccattgtgtcataaggagcgccaaccacagaagcaagaacatctcccggtcttaaaaccccaaacagacatgccgaaatagcctgcgttcccgaaacaatattgtgtcttaccattgcgtcttcagcacctagaatttcggcgtaaactttatcaagagcgtctctgcccatatcatcatatccatatccggttgtctccccaaagtgagcatatgaaatacggttattctgaaaagctttaagaacttttgcctgattatatcctgcggtctcttcaatctccgaaaaccgctctttaactttctcatttactttcttatagagttcgatagtggagtcttttaatccaaattcttctttcaaatattcaaatgaattattttgcataatcgagattgttcacatcctctttagagagaacattaacaccattctctcttaaaacattaatagaaagatccaaatcgcttgtttttaaaacgataaccgccttgcttgacttttcaccaataaatgaatatatgtattcaatactaatattcttatcttttaaaagctcaattacattgctgaaagcaccaacgctgtctgagatagatatagcgattacgtcagatatatttgcagtcatattattgccccttaagactttttctgccttttcctcatcatcaacaatcattctgagtattccaaaatctgtagtatcggcaatattaatcgcccttatatcaacggaattttcagacaatatctttgttatttcagccaatcttcccggacggttttccataaacacagaaatctgttttacatacattcctgtctcctcctttataaagtgttataataatattatatattacgtcccaaatcaaaagcctttaaatttacatctataactttcgctggaactgtattttcaagagcagacttccaaacgtcttctggtatatctgtctgctttgacaaaacaccaattaaaacgacattaacagtttttatattgcctgcttcaaacgctaatttatcagcatctactgatataatattaacttcttttgatttaattttttccactatatcatttggatactctttagcgcctataataacgggcattgggtcgatattctgtgaattacagattatcttaccgccttttttcaaatatggaagatagcggtatgcttccaattcctcaaatgccaggattatatctgcgccgcctttgtcgataataggggattgaactttttcaccaaactttacataagttacaacgcttccgcccctttgtgacataccatggacttcagacactttgacgtcataaccctcgctcattaacatgtttcccaatattcggcttgcaagtaatgttccctgcccgcctactccaactatcataattgataagccttcactttttttcataattcaatcctcctattcaattgcgccgaaactgcacacatttttacataatccacatccaacgcaaagagttttatcaatctctaagtaatcgcctctatccacaattgcaggacatccaagtttcatacacatcttgcatttcttacatttctcattattaatttttatcgggccggggaattttactgattttaacaacgcgcacggtctctgcactatcacaagagacggctcgtcagacgcaagttcctcttttaaaaccttttcacactgttttaaatcaaatgggtcaataatagaaactcggtcaatccccacagcttttccaagcagttctaaatcaacctgtttcgtcttttcaccctttagagtttttcccgtcgttggattatcctgatgaccagtcatacccgtaatagaattatccaaaactaaaactgtgtttattcccttattatacactatttcaacaagaccggtaattccgctgtgaataaatgttgaatcacccaaaaccgcaaccgtattttttgcgaattcttctcctcgtgctaaagacataccaaacgacattccaatacttgcgcccatacaaaccactgaatgtatagactgaagcggcgcaaccgctcccagagtgtaacatcctatatcaccgcagacattaactcccatttttttaagaacataaaagattcctctatgcggacagccgggacaaagcacaggggggcgcataggaacctcttcgtcaaccgtatcaaattcaggacaggcttgacctgaaataagttctttaatctgacgtgtagaaaattcatagcacatcggaaagagttcttttcctattacctttacaccgatattgttacaatgttcctctataaatgggtcaagttcctcaacaacatataaagtatcaacattctttgcaaactcttttatcatgttaacaggcaatggataaaccattcccaatttaagtacggaaacggaatctccaaaagcttctttcacataattgtagcacataccgctggtaataataccgatttttttgtcgccgtactcaattctattaagcggagttgtttccgcatactcacgcagtctatttattctatcttcaacctcggggtgtttttttatcgcattgcccggcatcataacatattttgctatatctgcagtgtatggtttaacttcaacttcctgtctttcagacagctcaacaatactttgtgaatgtgaaactcttgtagacagtctatatataacaggcgtatcaaagttctcactcatctcgtaggcggcttttataaactctttgcactcactgctgtccgacggctctatcatcggaactttagaggcctttgcataatttctgctatcctgctcattttgagaagagtgcatactcgggtcgtcagcgacgcctataaccaaaccaccgttaacacctgtatatgccactgtaaacaatgggtcagctgctacattaagaccgacatgcttcatggcacaaaacgctcttgcacctccaaccgaagcgcctatagcaacttccaaagccaccttttcattcggtgaccactcagcataaatttcatcatactttgccgcgtattctgatatttcagtactcggcgttccgggataagcagttgaaacaagtactccattctcataaagtccgcgtgcaacagcctcattacccagcataagctttttttccataatatgtatcctcctttagaatctaaactcctatatgtaagaacaaactaatcctgctctctcaaatcaataattctctttgcttttcctgtcgtcctctcaatcgacttaggctcggcaagtctaagctttgctcgaagccccagtacactgtgaagacgttctttcatttcattttctaatttttctatctcggaaaatctttcaaggagcgaaccgtcaaccaattcaacaacaatttcaagcgtatcaagcatattttctcttctcaaaatcagctggtaattcgggctcacctgaggaaactcaagaacaacgctctcaatctcagacgggaacagatttacgccttttattttgagcatatcatcagttctgccctgaataggagcaagtctgtaagacgttctgccacaagtgcatggttcaggtattatatacgaaatatctctggttctatacctcagaacaggcatagcctcttttgttaaagttgttataacaacctcaccggattctccgtaagggagtacttctccggttctagggtcaattatttcaacgataaacatatcctcattaatatgttcaccgcacttatatatacattcacccgaaacgcccggtcccattacttctgttaaaccataatttgaagtaaccaaaatacccattgaatcttccagcttctctctcatcttctcgctcatagcttctgagccgaaaaatccatatttcaatttaaaattctctcttggtatttctttttcttttatcatctcagaaagatacattgcatacgatggtgttgcaactagcgcagttgttccaaaatcctgcataagcatcagctgtttctgagtgttaccgctggacataggaacaatggttgctccaaccttttcgataccgtaatgaagtccaaatccgccggtaaacaatccataaccaaatgaaatctgtacaacgtcgttttcatcaataccgccggccgttacaatcctggcaatcgcctcagaccaaacttcaatatctccttttgtatatccggcaacaacaggttttccggttgtcccggatgacgcatgaagtcttacaacattcttcatgggctccgcaaacaatccaaaaggataattatccctcaaatcctccttagtagtaaacggcaagtttttcagatctgaaagagactttatcatttcaggcttaattccgctttcatcaaatcttttcttataaaacggaacgttttcatacgccttgcaagccatatgccgtaaacgctcaagctgaatatcctcaatttttttcctgtctgaacaacactctatgtccttattccaaatctttatcatcagtcaaaaatcccctttataaaatcatccttatattttggtgtatatctgctcacaagcggagtaattattattgaaactatcatagcaaccataccgaaagtcggtgcatactgagcattaaagccggacacaaccgccgggacaatagaggtcaagaatcctagaaccatacccgaccaggctccgatacgcgttatcttctttgaatacaatccccacaaatacgggcctaaaaacgttcctgccaatgttccccatgagaaagacataagcgtgataatctcttttggcttaaacgcagcgattgcaaatgaaagaccaacaaaaaccacacataaaatacgcattagtccaactgtatctttctcactcatatccggagcatattttcccttaaccaaatctatagctattgaactgctggacgtcataaccactgacgaaagtgtagacatagacgctgagagtataagaaccaaaagcactcccatcataacagcaggcagagctttattcagcatcaatggcattacagcgtcaaaaccttctgccggcacctggtttccaagaaataaacgagcaaacgcaccaataaaatatgcgctgcctcctattaacaaagcaaacaaagtcgatataacagcagcctgtttgattgatttattatccttaatcgtataaaacttatgtaccatctgcggcaatccccatgtacctaaacttgttaaaacaagcagagacaagagattaaaccagttctgaccaccaaacggagaagtgagattagaaccgtcctttggaatttgagataagctttgcagtccatttttaaggccgtcaaccacatcgcttgacaaaacaaaataaacaacaaacacaataccgattatcataattataccttgaacaaaatcagtcagcacagtagccacatatccgccaagagatagataaagcgctgtcaaaacagccataataaccatccaccaaatatagtcaaccgcaggaaaaaccgctgaaaacaaatagctgagtcccatatatactgaagctgcatacggggtcaagaaaacaaatattataagtgcacagaatattttcattccgttgtcattatatctggaaccaaaaaattcaggcatcgtcctgcttccgagtttatgcgtcatagctcttgttctctttgcaagaacaagccaagataaaagacatcctataaccgcatttcctatacctatccatactgctgaaattccaagattccaaccattctttcctgcatatccgataaatataacagctgaaaaaaaagaagtaccataggcaaaagctgaaagccatggtccgagacctcttcctccaagcagaaagccgtctacagtctttgtatgcctgatactatatattcccattccaaccatcataccaatatacaatatgagtattagaatattaatcactgtatcacttgtcatatttttctcccctcaaattaatatattagtaaatattatatcatcgtgctatggataatgcaagaaaaaaataaaaaaatatgcaatagtgttacaaaataaaacacattgcatattcttgttgaaaaatataactttaaacagtaatataaaagacggagaaattaatctccgtctaaaaaagttaatccttaaaatcggtgatatcaaacaaaaaattcatcacatctataaagtccctgtaatctttgtaggcaaacatatcataaccgcattcttcaacaagtgttttcagttcagccctatatgcctttaatctaaaattaacgaaaccatctatgttcatttcattgtttctctcaaaaaaatcagaaatttttccttttatataatttagatgttccaaactgtaccgcccggttattatatcacacacgctgtcataaaccgcgtcacgctcgtccccatccatatctccaaaaacgtcatctatacaactgtatataatcttagaacggtattttgctataagccaatttgcaataagttcagctgtgtcactgtccaactcacagctgtcaatttttaaacagctgcagtcatcgctttgttctgtttccggatctgttatctctgtaatattcaatggtcgtcacctccaaaaatgatgcttccaaaatcctttaattgtccattacctgcctcaaaaaaatctatttcacgttcttctaaaaacttaataattctgttgtctgtaattttaccggtaaacaccaaagtatcttccacaagaccgctggcgcctccgataaaaccatacggatatccaggcagcaaaacatttcctttttcaactgccaaacactctatatttaagacatcagataaaactgaatatatatttgcatcctctgtgattacagcagatctatctgcgatacacagattacattttgcatatccctgttttgtattaagaatggtataaccatggctttgatagtattcgataattttgggttctgtataccgaatatttgaaataacataatttcccactcttgctacattgtatgccacatcaagcggataagtgttttcaggcaccaaagtaccgcacaacagattatctatatttttgctaaactgcgcataatagtcatagcattcaggagcacaaaccgcagtgtttgaactcaaaaaatgaatttgtatatccggatgtgtattaagcggcgcagaaatcgaagtcatgggaaacgatttaatcaattttttttgaggaaattttctcctcagtgcattgattatttcttcatccatattattatcaacaatgattggcatattatcaactcctgaaaagaatttctgaataataaagaatatatagctaaaaatattacggggtgattttgttgtgtcaaatataaattgtactaattcggactgcaaatttatgtcagatggcaaatgttgtcttaacactgttccaaaggcaagagcaagtaaaaataaaactgagcaaaataaggctgatatcaattcagactgcccttattttatggcgaatgattcgatataagccttaatctcaaatttaattttcatttaagtattgggtaacataatcaactaaaatctcggttccatattttatgcagctatcagaagccgcaagcctgcagttgtgcaaaggatattgtgcagctttctcctcagtgcagccgagccaaaacagagcggaatcattcacagcacgcgtcaaatatgaaaaatcctctcctcccatggttggttctccgccaaagaatatatcctcaggcttgagatacttttccgccgagtttttaagtcgttctatagtatttttgtcatttatcaaaggcgggaaaagtctgtcgaatttatactcaaattccgcgccgtataattcacatatttgttttacagtcagaccaattttttcttcaagcaaatctctgtcataatcactaaatgaacgtgccgtgccttttatatgaacagagtccggaatcacattataagtacttcctccgtttattgaacatacagatacgacaaccggatttaaaggattaataattctgctgggtatagtttgaagagcacatacaatttctgaagatatcaatatagggtcaatacacttatgaggatcggcagcgtgtccgccttttcctaatatttttatagaaaactcatcaggacatgcatatgcggcgccaggtttaaatcttacctgccccacattaagacttggttctatatgaagcgctacacaagaattgacttttggattttccaatattccggagtctatcataggcttagcgccgccgctggtttcttctccgggctgaaacatcaactttacacagcctgaaaatttatcttttaaattatttaaaacctgtgcacagcaaagcaatattgaagtatgaatatcatgcccgcaagcgtgcataacattttctttttcggaactaaaaggcaaacctgaatcttcatttaccggaagagcgtccatatcggctctgattaaaacagtttttgaattatcttcatgttttaatccatttataattccaagcactccggttccggctagacctgactgaaactctatgccaagttcacttaatgtctcgcaaaccaaagaagacgtattaaattcatgaaaagaaagctcgggatttctatggataatatgacgcttatttatagcttctggaacagccttttctacttcagattttatatactcgtacatttcatacctccggcaggcttaattattatttaattttatttaccgcttccttatacttatcatataaatcagccttattaataaagtcaatcatagcgttgggagacatgcgaacaggcaaattaagcgattccaaaacctgtctccgttttaataaactatccggctttcccgacaatccgtcactgtataatattgacttagtcagtttagaattcatatcgacagtctcatatttatcgactgacatttctgataatattttcgccagcacatcgtcacttattccttcaacacctaaaagaccttcttttcccggcttatcttttcttttctctttaccggcaacagaaggaatgtatgcatgtttaacaacaccatcatttccaacgcattgcttgatataatttcttataacaaatcctgccctgtcactgtcggtaagaattattataccggtagttttagctagactcactattgtatttaaaagtttctttgatttaaatataccaaatccgttagtagaaataatcggtgcgtcacaaatccgctttatccgctctttatcaaattttccttcaacaattatagtttcttttatatgtaacataatattgattatattttattttattgcaaatgtcaatggttctattgactttaacgcaaagtacggttaaaataaaaagacataattaagacgaataataaggggatatatatgcaaaaaaatgatatctatgaaattgaaataacaggtatgacagacgagggcgacggagtcggcagaatcaatggatttgcagtatttgttccatacactattatcggtgaaaccgtccgtattatactaataaaagtacttaaaaactatgctgtaggaaaattgatcgaagttattatcccttcaaaaagcagaactaaatcagcctgtgctgatttttataaatgcggtggctgtaaactatggcacatgagttacgaagaagaacttttgttcaaaaagaaaaaagttttcgactgtctgaaacgaataggcggatttgataatattaatattgatgacgttgttccttccagcaaaatttcaagatacagaaataaatctcagtttccggtaacccctgaaggtataggtatgtatgccgtgcacagtcatcgtcttattgaaatgaatgattgtctaatctcatcagaagtcaataaaccaatattggaatcggtaaattattggatgaaaaagtttggtattgaagcctatgatgagttatcagattcaggattaataagaaatatctatacaagaaccggaaaaagcggaacgcttgtttgtattgtaactaacggccaaactctgccaagaaaaaaagaacttatagacgagattataaactgcggcacaaccatatgcggtatagttcaaaatataaatattggcaaaaccaatgtactgcttggcaaagaagccaaaacattgtatggaaacgctgagcttactgataatatttccgatattgagttttcaatatccccattgtcattttaccaaattaataaaccgcaaaccgaaaaattatatagtttagctcgtgaatatgcagacttaaaaggtcatgaaacagttcttgacatgtactgcggaatcggaacaataggtcagtttatggcgcgtagtgccggaaaaataatcggcgtcgaagtcgttccgcaggcaattaaagacgccaaagataatgcaaaacataatggaatagaaaacgcagagtattactgcggaaaagctgaaagcataataaaacaaattgtaaacagtggagaaaagccggatatagcaatattagacccacccagaaaaggctgtgacaaaaagcttcttgacgttttatccgatataaaaagcttaaataagataatttatatttcgtgtaaaccttcaacattagcaagagatttaaaatatctcaacgataaaggttttgcaccacaaaagattacacctgttgacatgtttccaagaacacctcacgttgagacagttgtgctcttaaaccgtaaataattttttaataatataaaaaacaaaaactctctttaaacctttaacactatttaatattagcatatttatccgtgtaattgagagaaaaataacgttttaatacgattacatgaaacaaaaataaatatagctatagttacactacaaaaacgataatattaaaaaatatataaaaggagagtcaaaaagaccatgaatgactcaataaatgattcaacaatttataaaaataaatctttttttaaaaacaaaaatatgtatagactttataaaaatgagataaataaacgtaattataaaatgttattatatgtcagcgtaagtctattacttttaggattgctctttttattagttaattggatttttcatgtttttaatgatgggacaaaatacatttatattttctggataagtttttcttgcctatgtcttgcttgctgtgtccttttatatcaatggtttgtaaatcatgcaactgctattttgtatatttttttatctggtataatgatgtccatgataatttcaggaacttatttttatagagaaaatgcttctgccataatgattggatgtattgctagtatgccaattcttatttttgatgaattatggagattttatttatttgatttctttatttgtatactgtttataatattctcattcataacaaagagtttttctatttcaattattgactgtgttaatacactaacattttgctttatatcttgtatgattggaatgtatactatacgtttaaagctatacgatgttaaatcaaagtatcaaatgatggagcaattgcaaactgaccagctaaccggtcttatgagcagaaatgctataattaaagaaatagaaagttattataaatctgaaaacagaacttccggtgcattgtttattattgatattgatcattttaaaaaaatcaatgacacatttggacaccttcaaggagatcgtgtattaatagaatttgctcaaattattcgagaaaatttccgagaatcagattatatggcacggttgggcggagatgaatttttagtatttgcaaaagatattgacaatattgagacaataaaggaaattgcagaaagactaaatcaaaaagtcagaaaagaaatcactttgatggaaaatcatatttatttgacggtaagtacaggtatagtgttaagtaaaaggtttacaaactttgaagaattatatattctggctgataaaatgctatatgaggtaaaagaaaaaaacaaaaacggctataaaatttataataataattaaataattatagcaaatatgagtaaaaaacatatgttgctgttatctataccagtaaattaaattattcatagaaatacataatatacaaaaaactaaatctacatagttgaccttatataaggaaactgcataaaaatttttaaaatttcaatgttatattaaattaacatatttaacgcctatataaatacagataaaatactttaaaaatctataagtaaaatgtttcttttagtaaatattaaatctgttaacatttatccaaaaatccttcagattgacactaaattgatagttcataatgagacgataaatatacaatttagtaggctgagaactgacgatttactatcgtcagttcttgtttataacaaatttaatttaattagcttatataaagtattttcacatttcctaatattctttttatttcggaacgcaaaaactcctccgcttctgctcttgcctccggtctgtaacaatatcttcctctgccgcgtcctgtcattaactgcttgtcatacaaatccaatgcattcgggaaagcctcactgttaatggcgcggtgcacatatgaatatgtcatcatgattatttctaaaaacatttgtttttgcgccttctctgtcaaaccatcgcgcagctgttccaaaagctctgtatacatcgctttccagccgtctaccagcattaccggagcaattaacagtccgcatggataaccggcttcacacatacggtttactgcctctattcttttttcaagactggaagttcccaactcaatacggctgataagtctttgcggattaacgctcatacggaaaataacttttcctttatgagggaggtcaagcagactatccaccatatgaaacttggtaggaaacgtaagacttcctgccccctcttcagcaaaacgtggaatagtatataaaagattatttgttattgtattttcaagaactaaatcactgttgctgccgatttcaaaggtaagcggtatctcactgtttttactcttttttataagcctatccagcatttgttctctattaacaaacagacggaggtaagcgcacttattataattacaaacaagataacaatataagcacattgcagtgcagcctgatgaggtatatggaactagatagtctgacactttatgattttcaacatacttatgagttttcctggttccaactattaagttgcgtttcattttaccaaattcggaattctctttttctcgcatttcctttatagaattgtggttttctattggaatccatggtaaatcataaaactgttcctttaattgctttcctagctcaaacgatagacttgccggttcatagtatactgcgtcaaaatccataatatcctttctgctctgattattcagatataattcgtattttgattatagtatgcacctcctctacataattatttatattggtttttaagaattataaatatctaaatttttttaaaattactttcagattttggatataaataaatatattttttcttttacttgtgttatactttctatatcacaatttaagcagaaaattttatctaatacgttcagttttatacgaacttatatattttttaacatatatgtaagactattaaaatttttattttaggaggaaaaatctatgtatgatgttattattattggagctggaccagcgggaatcagtgcaggtatatacgctgtcagcagaggccgaaaaacacttattcttgaaaaagaagaagtcggcggcgttatcgggaaagtatcaaccgttacacattattcaggtattatagaacaagagacaggcaaaacctttgcagaccgtctcaagaaacaagctgttcaatcaggtgtagaaataaaatatgaagaagttaaaaacgttaaactcaccggagatataaaaattgtatcaactgatacagcagaatatcaggcgccaaaaattatactggcaaatggaacaactccaagaaagttaggtatccccggagaaagtgaattagccggtaaaggtataggaacaaacgccgctatagacggtccatctttcagcggtaaaaacatttatgtaatcggcggagctgacggcgctgttaaggaagcaatttatttagcacagtttgctaaaaaactgactatcatacactttgaaaatactttaggctgcattgccgaatttaaaaacaaaattaaacagctgcccaatgtttctgtcctaaccaattcaagactaaaagctgtatatggaacaaatcaaattgaaaaaatagatatactgtcggaaaatgacggtaaaataacaactattgaagatgagggttgcggaatatttatatacgcaggctcaacaccaaacacagaactgtacaaagaattatcattatctgacggctatattccggtgaatgaaaagatggaaacttctattaacggcgtttatgctgccggggatatttgcgtcaaacaagtaagacaggctgcaacagcagtttcagacggagcaattgccggaataaacgctgctataatatgattatagacactaacaattcttaaatggaaccaaattataccttttgtcgtctaagcatataaaaacaatgcatagggagagaaggtaaatgaaaaaattattattaacatttatggttttaacattctgtttatcaagttgtattatcgcatttgcagataacaacatcaatacagaatccggcagtattattgaagcccctgacctaagatttactccggcaggcggcggaaaatttatatattgcaacaatgaagaaggtataggccggcacgtacttgcagattcttcaaatccaaatccgatctataccatgaacaacgagaatcttacaccggacaggtatttagtatatttgacgcatataaattacacctattcaatcgatgaatattaccagccaaacggcatgggatttaatattgaactggacatggaaataaaagctaaagaagattctgtactaacaattaacaatgctgtatttgaaacgccaaaaatacgtcgttattatgacaataacggtgatataaaagtcgctttttctgactggggagcaatgaatgcatgtgcttcattgctgggaaaaccaatatatcagcttcattcaagctcagtatttaaacccagttcttataaacctgtcacggtacatataaaaaaaggcgaaacagtttggctgagccaatatgtaaataactatgcttcaactgcttttatggaaccggtttttatggctgcagatatgcagcttgtcagcggaaaacttgatatgaacgttgtaaaactaaaatctaatgataaaatcggcgaccgaagctactttaactgcgagggcgtcgcctttggctcatatcagcgagaccgctgccaaaagggaattgccgacacacttcccgaggtcaacactgagcttaaatatacaatagatgattccgttgaaacaggaacaaatctgcctgttaaaatttataatcaatacgtagatggtgaagctgttgatatgtggtgtactaatctcaatccacaggatgatatttggtctaagtacattgccgcagaatcggacattttaacatttaaatattacgatccttcaaaacttagctactatggaaaaaacgtccctgcatcaaaacgcgacgcagtatgggtctttgacacaaaacatagcgatacgagttcctatttaagtgaaacaggattatctccggacaactacagccccaatttcatcttagaccccggcagagataactacggtattggatgcagtataggtaattatggagttacaacaaaatataacttaaaagtaacaaatgctggaaatcgaacaaggtattttaattataacctgcttaccagcggtaatgttattgcatacgcaagggataaaaacggaaaacttatagatgaagttcactcaaaaggtataacagatgagcaaaccacagatacaatggcatgcgtagaacttcctcctaatcaaactactcagttttcaatagaagttatactgcctgttaactatctcgccggactaaaaaattcatttactataaccgatacaaaaagcgagttcgatttgaaaactgagaaaaaagcccctgctccggattatgttacaatactcagcgattatatggacgaatataataatgccaacgattacacaaaagaattctttgccggaaatcttaacaattttgaagtcaccgaaactgattatggctatatgctgcgctggtgcgcctgggatgaccaaccggggtatcaagcaagattctttagtttgatgagctatatatattttcttgacaaagactttaatatggccggctcgcaaaaattttccacatttcctgcagaatgcagcgccggaaacgggaaaatggtagttaaaaccattgacggaacaaaaaaatttactactgacggagtaaattgggcaagtgtatattggagtgaagatacaaatttcgaagatgtcattttagttaaactaaatggagaatatttaaaatttgatcaacttcctattattgaaaatgacagaactttggttccgatgagatttatatttgaaaaactcggtatgacggttgaatgggacgatttaactcagactgcctcagcaaagaaaataaacggcaaaaacaactcatttgaaataaaatttacaattggaagcgataccgcttttgtaaacggaactgtacaaacaatggacgttggaccaaaaatacttggcgaccgaactttgattccactgaggtttcttagtgaaaatttaggttatattgtagattgggaagagatttctcaaacggttactatatctgaaatgccggttcttcctaatgtaacacaaaaatattatgtcatctaccgcgagggataccgcgacggcaggattgaagtttcgttctttgatacgtcagacggctctgtacctgaacttgtatgggacagagaaagcggaaatttggagcttagcgacaacacaaaatactcaaacgattcaaaatggtatttagataaaaatacatggcagtcttttgaaggcggttacgaaagaccaagcaacaatgctttacagattttaaggtcaaatataaaaatcgttgctaaagacactatagattctgatgttaataataacagatcagaggagtaaaatcatgaaaaagagaagcctggatgttaaaacaatagttttttcttatttgatatttttagcgggatggataatatggtccaaaacaaataaattaatatcaataaatgaatatattgactggggcatcgggcttcttgttcatattatttggtggcctttatttgcaatcgttttaataaaacgttataatgataatttaactgtatctctagaagaaatgctgttcacaaaacccaagcttaaactgcttattccccttttggcttttgcactcgtttataatattggcgtatactttcttgacagtgatggttttagattagaaatgaaagtatatgactttattgtaactgtattaactgttggcttttttgaagaaattgtattcagagggtggtttcaaaatgcaatctctcgctttaccggcaacagaattggaaatttgttagcttcgtttcttttcctgttcatacactatccttcttggatatcacatggttatggaattattgcaattattacaaacagcatcattttatacggactgagtttattatttggatggactttcagaaaaaaccgctcaatttggcccggcgttatatttcattcattttgggacttgctgtctttcataatgtgatcatctatttaaataaaatgtgtgtttatctgttcattaaaaaaacaatcaactacaattataaaacatattaaatattcggttttgttatcctgaaaatatactttcaggatatttttttgttaaaattactatgtattataaccgattcctatttttcttaactcatgttattctattgtttaataaataaaaaatatttaaaaacactgtttccttttatattgttactttgcttttatatcctttttagcaaatttatttaattactattatttttctttaagaaataagagttaattatatattgatttataactttactacttaaataataaatatgctatatcaaatttctgtcagataatatatttcaatttcataatcttttataatttatttaacctatatgtaatcaacaaatttataaatttcacattaatgtcgaaagaaacataatataaataaaaaataattatatctaggattaagattgaaaggggcatactcatagtaaaaatatttaaagccataaaatcacttcttgataacttttgtattgttaacaaatgtcttatgcttataatgctgattttacttcttcaatcggcctacaatatttttctcgatgaaccggcttatcaagaagaaaatactatagatgtaatagtgagaacttcgcaggcagctattttcggatactttctaagcgccaattttgcaaacagaaacattaaaaaaaataacaataatacaaaaaataatagaattaaaaatgaaaatataaattcaaaaaacagtttaaaaacagttgaaaattctataggtttcacaaccggggccgataataataatgattataaattgggaaatatagatatagaaaatgaagatgagcaaagttccgacttagattgcagcaaacatcaaattataatagtaacattaatttgtgtgtcttgtttaattatactgcttactttcagagatttctgcgaggttacaccgagagtagcatcaaaagtatctcaacttagagactttgtctctgccggcgtcggatttttagtaagctgcggcaaaaataaaagctaaaaaactctgagaagtaatacttctcagagttttaatttgtcttacttattaatcaccgtaaattccagctctgtcatttactacatagtatcttaaatcttcttctgtcagcctcagtcttccatatatgtcaccaactatataccccttgttgacaagtttagtaatagttgctcttgcccactccggcatattgccgtctatataatcataatatgtaacctgttctgcacctgaaaccgcagtatcttttggtatatcatatgttggagctttagttgtggtaggtctttgatattcagcaatgctcattccgtcaagccaaatattcaccgctttgttttcgctgacaaaatacattgtagcacccaaagcagttaaatcaccaacatatatgaatgtatatccggatataccggcgaaactctgcatttgatactcataatcattagcgtaaaccttaacatctgaagtatagacatcacattgttttgttcctaaaagatttgtagccggaagataaaccggtataggattaggataaactttgtcataatttctgaaaattctcaaagtacggttagcagaatcccaaagaacatcaaaaccatacttgtccaaatcctcaactgcaaccataggataaccgttcactatccaagatggaatagcataatgattaacatacgtaataatatcagtataatcggcttcaccaacatattctcccggtttttgtatagaactatacgcatatgcaggcattgccagcgcacttaaaataaatgtaacagcaacacataatgcagctaacttcttcaaaataaacactctccttatttggaattaataaaatcccggcatttacatataaatctcaggaagacactgatatcttaaattaatctatataatttgttatataatatatgacgactaattttaggaaaagtttcatatttataaaaacttgccataaaaaatattatatcaaaaaaacaaataattgcaagccttttttagtaactttataaatattgatataaattaatataaattatttccgcaattcctctactgttcttaaaattgctttatatgcgctgtcaggattatccattcccatgacagctttttccataggacatatatcattacccgacctattaattatcgtatcagcactctcaccaaactgatatgatataccatgtttttttaatacgtcttctccgcctttgcttaacacgcaggcatacacttcttttacacctgcgagcacaaacagcatagccgcggctcttcctactattctgtcagctgccgaatattcggaaaaatcagtgcctttactaataaattccagcataggtctaatcccggaataactgctctttaatacatttttaccatcacataaaacacatgttaaagattcatcgctcaacaatatttctttagctttattcattttcaccacgcttattgtaccagaatataaacaacggtataattgaccactgtaaaataagtcccggtaatccctgaactatgcttgacaaaataactgacggcgacactgcctgtatattaaaaatataaaatgaggcaagtattgcagctgctctaactcctctgccaaaaaactgtgcgataattactttcaaaataaccggaagttttacgtcctttaaagcgcctgccgcaaaaccatataccaaaagttctaccatcataaacggaagcattgctgaagccggcattcccgtaagagcaaaacttataagcggactaaacaacccggcaataattccaactaccggacccgcaataagcgcggctatcaaaatcggcaagtgcataggtaaaaatgactgtccaagcgctggacctgttccggaaacaattcctacagaatgaaatacctgcggaagaacaacggcggcaattactgccaaaactgttgcggctgtcttttttctgataacatttttatctaatacatctgaattcaacataatattcctcctcacttataatctaattatactatataaatttcaattcttcaataccaatctttaattaattcctaataaccaacactgtattagcaattccatatctcatctgaacaaatacggagccgccttgttcaatatcagaattatcaccttttataagaacttttgttcggcggtcatacacatatatacttccgttaagcggaatagttcttaaataaccctgaactgtattccccataagcaaaatcttatcggaaaactttttatcaactatgcctaaagatgtgtatagctcactataaaacaattcttcactcagagccccatagtctgctagatttttttcataataatcattattgtaaatctgttcttttgtaagcaatatccggaaagcagcacattttccatcacgttcggaatattgaagaacctcacccgtactaaatgggtttacaccattttttgtatcccggttaacgtatccgtcaatccatccgttagtcctgtctgtggccccgtcattatcaaacagtaattctttctcttcgcctccggaaaacattttcagacttaaacatttatcaccctcatcatttacatatgttcccgaatttataataactccaactggactgtagttatatatatcagcgtcgtctgtacccaaagttattactgcggcacccaccttatactcatcatttaaatcaaacagctgtacattatacgcggtatcgctgagcaatctgcttaaatcagacacttcatattttgctatctcggatttatcatttggcacaacaaacacttgcgtttccgaactcaattggtactttgacgcaaatatatttaaagtatcataaaatttcgctgaatcagatacatagttccttgtaaacagctcagtattaacttcaccgaacaaatcaacagcagtatcaagaacagctatagtgccgtcacccttcaatgaaaatttaactagttgtggagacagatttaaaaagcttttaacagaagaaactgagccgttaagcgacgactttgacgttgcctttatctcttcgcctttgccgctttctgtaataatctgaagagtagccgtattaccaaaaacatcatttaactctgagactgactttaaatatccatatcgttcgccgctcaccgctcctctgcaatccacgatgtttccatttatgtccaaatatacagttactgtatctgaacttatatcaatcgtccgattagtatcaaggaagtaatttgaaagcttatacgtcttatctcctattgtatattcctgctcagaactatttatattcgtgactgttccagtatcagtatcgactgatattcttatatcagcaattttaccgtcttcacttttggctatacacacaacctcatttttatttatcttgtattcaggagtataaagaactttttcattgtcatattttagtattaccgtatctgcctcatcaagattaaaatttaccgcacccttatacttatccgtaagcactccgcccagctttgaagaatctgatgctatatatgtatcatagtcatacaccattatataatccgcataactgcttccgacgttattagaaataacttttagatatccgcatttaatatctatattgtcaataagtccaaccctggtttgatatttataattatatattacttttgtattagttccgacagctatccgcttttctctgccgtcatcaccattataacataaatatccatcatctaaacgatcataactattgtaatcaatttctgtaatcttagtgtttttatcctgttcaacatacaaggctgtatagtcattctcatctttatcatacttcacataagccgtaaccattatgcccaaatattgaagcatatcataatccccggttttgtatgactgattattcagctcaaaccttccgtctttcgcagctccttctgcaaacacacttgcgtacccgacatcggttatttcccctctgcgctcataaatgctgtgatatctgtttaatatagttgaaccgtcatattcatatctgttttgaccatctccaaaagaagtttgatatatcaattcaacatccaaagcattgtccattaatatagcagcgtcgcctctggataaactatcctcatttttcaggtcttcaatttccttcaataattttaaacgtgacgcctcgcgcatatatcctgacgggtaaccaccattttgattagcaacagccgtataacccaaagaagaaaccataatttttaccgcttcctgaagcgatatattaagctcaggattaaaattaccgttttcatccccgtttactataccaagactgtagagtgcatatattgagcctgctccccagtaatcagcggttacatcattaaaaacctgctttagagacgccggattatatacagaatttaaatccaggagcttagccatcatcgctgaaaactcagcccttgttatatcaccactcggcttaaactccgaattactataaccgtttatcaaaccaagattttttagtttagctgttgaattataatattttgttgacacacagtctgcaaaaccaacttcgtcagtattatgttcttttaactcaatactttctatacaaggcgaccatggcgtaccgccgatatttccaaatataatctttataaatttagcttccgcaggcagcttctttaaactgtaatgcacggttatccacttactcggctccgtatcatcaacagtgatgattggattaaacgatgtccaattttctccgtctgcagaactttcaaacgtgaagtgtgaaagttcctcattgggtgaaaatgcagtgttaaaaacaaaataaccattgggttccaccgcgtattccagccattcggcatcggaagtcacccttatgatatgcgtatcatcaccgctgaaagcatacttgttttcatctgtaaccacatcaagtgataaaccttcactataggcaacaactttagaaaaatcagcacagtcatcgtatacatttcgttcagtatttatatcaacatctgaactttctgcaaaaactccctgaacactcacggcacaaataataatagataatataattgataataattttttcatatgtaaactccaaattatatttgattctctactcaaaagtatagaccgtttttccgtttgattccatggtctttttaagatcaatcatcctttgatttttgcttcccctaaaccttaacaataaagttttttcagacattatgaactttccgtctatcaaaacatcagctaaacttaaaagccgcataatgtccttatcctctttagccatttcatataactgttcaaatgtatatccggaataaacagttatgttttttcctaaacttataatctcttctgcaaggtcagccaacgccccggcctgacaaaacggctcgcctccggaaaaagttattccgctcagcaaagggtttgctttaaattcttccaaaacctgtccgctgtctacaattgttcctccgttaaaatcatgggtctgaggattatgacagccataacagtgatgcggacacccctgaacaaacaaaacaaagcgtattccgtcaccgtctgtaatggattcttttacaactcccgctatttttaacttgctcactcaacattccccatttcattaatggcggctctttttgcaacgtaagcaatatcaacaatatctataacgccgtctttgtttatatccccgtccctgacacttttccagtccttatcttcaagttcagatttatcaaaataagtcaatattattttaacatcgttttcatttacggttccgtcaccgtcaacatctcctaaaacggcagccttcaatacaagttcgatttcagttgaaagattataatcagtattctctgcctttatcttaaacttactgccatctttaaaatcgctgtatattttgataactccgtcttctgaaatttctaaatttccaatttcactttcagctatagagaatttaacactgccatcaaatttctcacctatttggtcagatataaacccaatatactgatactcagaaaaatcatatcttggaattataagctcgtttttcccttcaatatttatcttcaccggctttgcttctccaattacagcagatacctttgcaattagaggcgtccaccaattctgtgtttcaggaaaaatcacttttatatacttagtttgatttagttctgaaagcctatacgaagcctttgtccattttcccggagcttctaaataatcacagttaacttccggtttgctccatgtgtttccgtctgatgaaatctcaaatttaaaatcagtaagttcttctcctgcaaaaaaatatgatattatttcagcttcatcagagtatggtattgaataaataacctcggcttcaccgtcacccgctctttgaaaggtagtaaagtcatcgtaaaaagcgtcccggctcccatcatcaggaatcaaataagcgtaaacattattatatgagtataattcagccaaattctcgcactcataatcaatatcagggtcaaacgatgaacccggagtttcactcggcatcggttcttcagtaggaatagatgtaggagtcggaatcaaatccggtacctctgttggcgtcgcactaggttcgctcttaacaatatcagaatcattttgtttactatccaaatcgttttctgaaacaggatatgctttgtccttgcctaaaaccttcatctgttcctcagattcaacaggattcagcgtattaataagattccaaattagctgtgccgtttcagctctgctcatatcatctttaggtctaaaacattggttttcatcaccgttgatcacacctgatgaataaagtctataaacataatcaacagcatagtcagagattatattttcatcttcaaatgttattttaagtctgtatgaatcaagtgatatacccattgcgtcaattccgcggcacactatagccgccgcttcttcacggctgatataagaatcaggtctgaaagtttcatcatcatatccattgaccattttcaaatttaatgcggccgaaacatacggcgcataccattcagaattatatgtatcagaaaacggcaaagatatattattttcagatacatctgcttccaaagccgtaattataaatttcaaaaattccgctcttgtaacactgttttcaggtttaaagcttccatcctcatatccattaactatacccaagttataaagttcaatgacagcattttttgaccagctttcatcatttatatcattaaatatatctgttggtttatttgtttcctcaggtataacagttggtatattatttgaaggttccattgtaggagaaaccccggtagtagagtttgttccgcctccaacggttattgaaccgccggatcctccgcctcccccggaacttcctcctccggagttcttagcctttattgataaactcacgtttttattcaaatcattatattttgtgtaacccataccgctgtcaatgagcacagcttccaacaaagtaacctgagtatttccgctcttttttgcaacaaaattcaacgttgtcaatagactgctcttgatatttgaattatcagaagagctgaccgctaatttaagaatcccgtctgaaaccttttcagcagtaacaaccttgtccttttcttttaaactatatgatttatatgtaagaaaattttcatcataggaaaacaccagttcaaatccatatagattttcaggctgacctgatacatcagtttttacataagcggcatctcccacagttaaacctgtcacaggattagaaacactaaacacagcctgtccttcagtttcataaggtgccggaagttcaactccataagccgtaacagaaacggtaattaaaactgctactaaaatacataataagaaacaactcttaaactttttcataatacccccatagaaaaacaaaataaggcggaataattttctattattccgccagattctgaatttatctttcataaaacgctttgtaacctttataagccatatagacatccagctttccggcaatctcgtaaggagagtgcatcgaaagaatcggaaccccaacatctacaacatccatatctaaattagcaacaaaaccggcgatagttccgccgccgccgccgtctatcttgcctaactcgcctgactgccattttacatcattttcattaaatatctttctaatttgagccataagttcagcgtttgcatcacttgaaccgctctttccgcccgaaccgctgtatttcataacaccaataccgccgttaaccaaagaagcatttctcttttcgctcgcttcagggaagttcgggtcaaaagccgcacatacatctgcagaaagacaaattgagtttgatattgtgtcacgcagtttaatatcgttataattttcaactgatttatcaacaatctttgcaagtacgttctcaaagtatctggaacgcatacctgtattgcctacgctgccaatctcttctttatcgacaagcaaacatatagcagtatatttaggtttcttaacatccgctacagaccttaacgcggcatatgcacaaaccctgtcatcttgaccatatcctgcaaccatgcttctgtcaaaacctaaatcacgagctttataggccggtacagcttcgatttcagaacttataaagtcttcttcacatatatcatacttttcattgagaagattcaaaatattatacttaactttttccttcacatcttctccgcagtcttttccttcaatgtttcccaatataatattcaggctttcccctggaatggcttctgccagtttcttttgcatttggtctttagcaaaatgcggaagcaagtcagatattacaaaagttgggtcgtcatcctcttcgccaattgaaatttgtatctgtgttccatcctgcagcgttgcaaccccatgcagagcaagaggtatagttgtccactgatacttttttataccgccgtagtagtgagttttaaaatatgcaaaatgactgtcctcatataagggattcggcttcaagtcaagtcttggagaatcgatatgagcgcctacaattgatgtgccgtttgtaatatcctccgaaccgataactgccgcaactattccttttccgcggttaacagtataaactttgtctcctgcttttaatgaatcctttgagctgagaggcacaaatccattagtttccaaatatttttgagcgtttactgcaaactcacgttctgtcttagacatatccaaaaaagacctgtattcactgctgtaagccgccatgttctttttatccgtttcactcaatgatgaatactgattcttgttttcataaaaaagattcttttcagtttcgtttgacataataatacctcctatttatatttacactattcataaagctctttgtatttttggtatgcggaattcactccggtaacatagttttttgtctccgcaaaaggaatatctgaaagtccgcctttaccatccttatatctttcatctttcagccagctgtcaacattaccaataccgccgttataggcggcaatagccaggcttatatcgccttcatacttatcaagaagccatgataagtaatatgtgccgatatgtatatttatatccggaacatataagtcatccggcaaattaactttcaaatcaagttttttagcacagtccgaagccgtctctgtctgaagctgcataagcccgtacgctccggcttgggatactgcatactggtcgaacttactttcggcttttataaccgcgtaaactaaatatttatcaacatcatactttttggagtatttttcaaccaagttttgatattttattggataagtctgcgctgttatattacttcctatacccgaaagcgcattatttattcctgaaacacagctcctaaacagaaaagctgataataatataataactattacaccaaaaacggcagccacagcacaccctttattgccttttttcttcggaggcctgcgccgtgttctgtcaggtattctcatatatttcaacctcaaatcattattttacgtattcaaacttatcaactctttataaatacctgttacacatattctaagttcatcaatattttcataattattttctataacataatctgctctttttattaattcttcatcagaaaactgattttttatacgttccaaaatttctgattcatccataccatcccgccgcattacgcgtttgatgataatttcccggctggctgtaacaacaacagacttgtcgtattttatattaaaatcatcagaaaataataatggcacatcaagcacaatcatatcacccgaaccgctggcagagatatacttatcaatcatattctgcatttttataaaaatatatttatgagtaatgcagtttaacacgtcaagttcagctttattattaaaaacaattttagccaattcttttctgtttatagttccgtcggaacttaaaatcttcctgccgaaatgctcaacagtttcaaaatatgccggagtatccttatcaagaacagttctggaaatctcgtccgcgtcaatagtatatgcgcccaactctgataaaatgtgggaaacggtacttttaccggaaccgataactcctgtaagcccaacaataatcaatcagcccaactccttacatacataccaatatattataacacatactatcatttcctatcaagcaaatcaaaaattgttctcaaagatttaatataattgaaacctgctgtaatatttttgttatcatattaaacaattattttgtatcataccagctatgaccaacgttcagatcaacaataagcggaactttcagcttagccgcattttgcatttcttctctcacaaccctttctaccgcttctttttcatcgcttacagcttctactataagttcgtcatgaacctgcagaacaagcttggatttaagtccttccctttttaatctgttatacacgtttaccatggcaatttttattatatctgcggcagttccctgtataggagcattcatagcgaccctttcgccaaatgcctgggttattttattgcttgctttaagctcgggcaaatatctccttctgttatacatagtcgttacatacccgtcttcttttgctttttcaacaatattcttcatatattcatcaacttttggataatgctccaggtaatgtttaatatactgatccgcttcttttcgtgaaatctttaaatcctgagcaagtgaaaaagcgccaataccataaactattccaaaattaacagccttagctctgaaacgcatggtggaatcaacctcatctaaaggcacatcaaaaacttgagaagccgtttgtctgtgaatatctatattatttctaaacgctccgcacatattctcatcacccgaaatatctgcaagcactcttaattctatctgtgaatagtcagcgtctaccaaaactctgttatcaccctcagccgtaaacattttcctgatttcacggccaatatcagttctgaccggaatgttctgcaaattaggctcagtactgctgattcttccggttgccgtaaccgtctgattaaaacttgaatgtatgcgtcctgtcgaagggttaattatacttatcagactgtcaacatatgttgagttaagctttgtcagagttctgtattccattatatcttcaataatggggtgttcacccatcagcttatttaatacatcaatatttgttgaataaccgctcttagtttttttaccgtgaggcagcgacagcttttcgaacaatatatttccaagctgcttcggagaattaatattaaattcctcacccgcataatcatatatttcagaagttaatacttctattctggatttaagcatatttccaaatttttcaagctcactcttatccacgtacataccggttatttgcatatctgcaagaacttcaacaagcggaagttctattttataatagaggtcttcctgctcattcttttttatatcagcttcaaaaaaattctttagctttattatcgccgctaaaactccggcgtcatcattcgaatcttcattgcctaaatccatagaaatttgtccgtcctcttctatatttgaagaaggcatattcatacctaaataatcgaaacacaaaatatctaaatcgtattttgttcttgttggattatttatatatgcggcaatcaaaacatcaaaacctatcccattaaactttatatttttatcgtttaggcgtataatatcattttttatatcatatccgagttttgatatgcgttcattttcaaaaaagctttttaaaaaattgtcatcacacgtacagcagcaaaccttcttgctgtctatagaaaagtacattttatccataccgctgtttagataataataaacgctgtcagcatcctttaacataatttcagcgccgcttatatctattttttcacagtcggaagaaatagtttctatcacacgctcttcctccgcgacgcctttcagattaagtcttttcaaaaaagacttaaagtttaatctaataaatatttcactcagctttttttcatcaggctcctcaaacttataatcttcaaacttgaaatctatgggaacgtcgcgaataatcgtggctaatttcttgcttaaaaaagccatatctttatcatttttaagtttagttctgacagagttagtaacttcaatttcatctatcttatcgtatatattttctatgctctgatacttttcaataagtgaaacagctgttttttctccaactccttttacacccggtatattatcgcttggatctcctgccaaccctttaacgtcaatatattcgctcggtgtaaccccaaatttttcaatcacagcgttataatcgtatggagtggtggttgtattacccatacgggtcactactagcttaactacagtattatctgaagagagctgcaagtcatctttatctcctgtaaggatgctgcatgaaacatcattttcatcacagatttttgacactgtccctataatatcatcagcctcatatccttcaagttcaatacatttgcagtccatagcgccgagaacttctttcataatcggtatctgaacgataaaatcatcaggcgcgggctttctttgcgctttataatcatcaaacattttatgcctgaaagtgggagcctttaaatcaaaagctactccaagataatcaggagtttcctcctcaagatattttaaaagtatatttaaaaagccgtacacagcatttgtaggcgtgccgtcaggagcgctgagtggacgtattccataatacgccctgttaagaatgctgtttccgtccacaatcaatagtctctttttctcagacatagtataatcctccgaattatcataatgtgtatatgataacacacattactagggaattcaatcaaatttttatttggaaatcagataataaaaataattattgaagttagctttccaaatattttgatataatctgatacgccgcgtctatgtcgcgtttatcgacaatttcagatgaggtattcttattttttactggaatatcaagctcagcagtcagaattccttttcccttaatatttacacttgtaatatctccgtcatcaatcttcttagctataatttcacattttatatcattatctttgttctcaatatttaaattgtctttcatggacatgagctttattgctatagacctgtcatgacatgttgaattaattaggcatggtataaaacatccgctgcctaatttatattgttcctcttcaattgtatctagagttattgcctcgtcaaactcatcatctgaaccaaaactcagctttgctcccctaagcccaacttgcttttgaactgtaaacacacaagttatactgcaatcatagtccgccttcaacagcgcagctaaaacagcacagcaagcccgctgtcctatagctttgtttgaaacgccatattcaccaagttcggtatatttgcttttaaatcctgcaaaatctcctatcaaaacttcactctcagcaacctgtttattatcggcgccaatgtcaataaacaaatctttcaggcacacaagtttttcacgctcttcttttgttgataaatgaacagccttaagagaaataatgcccggaatcattttatctcccacaacgaccgattctgaaactatcgactgaggcctgattattccaaccggttcaaaactcaaaaatgctccgccgccttctttataaccactgattataaatccaggctcatccatgcttgccataatcaaaatattcttattattttttccatgcttttttgctattatattgcctatattatcaacttttatttcatcacagcttgaccttatctcagacaatattacttcacgcacttgcctttcccgtcctgaaacaccaaacgcttccgacaaatgctttaacaaattcatatctactttgctcatttaatcaccatccattattaattaatttatgcttcattgttataaatcggcttattctcaaattgaaaagtgttttacagccgctgccactaaatttgaaacgttctcaacatccgatgttttcaaaacttccacatttgtgtgcatatacctgagcggtattgaaatcagcaaaacctgtacgcctttaccaacagtttgaattgcccaagcggtagttcctgaagctcctccggcaacttcaatcttatgatttatctcattttcttcggccaaatcgatcaatttcagtgccttatcatagtcaacatttggtcctcgcagaataatggctccgcttcccagttcaaatacaccgcagtcatcctttgagtctacagtggttccatgagtaacatcaaccactattgccaaatccggttctataccataggtacttgtaaacgcacctcttaacccaacctcttcctgggtagaaaacacaacataaacatcattctttaaagctgactctttaatctttttaagcgccataattattgctgacatacctgaccgattatccagcgagcccgaacagatattgtcgcacaacaaattcgtaacctcatagtcaaagacaatgtggtcgcctattttaactatactctccaaactttctttctgaagtcctgtgtatattcttagctcctcaattgcagcatttttctcaccgccgtcttttggaaccataattacaccgggtatctgtttctgaccatttattttaactcgcaaacccggcaaaattctaacgtcaataccgccgaccgcaacaaatttaatctcaccgtcttctgtaatctcagacaccaaaaaacctacttggtccatatgagcttctatcataattttttgtttctcttcattttcggacgacgttcctgtaattttaccaatcacatttcccatattatctatgtttgtttcgtcacaatactttgatataatctcaactgcaaaatctgaaacggcagactcatgtccgctgactccatatttttcagtcaattcagttattaattcagctgttttcataatttctccttttttctaaaatcataatattttttatcaggcatataattttatatatttagctcagcaaaagtattaattggaggcctacatatatgaaaaaattttttgataccggaatgccaaatgtagtaagcaatgtaaatcagataaaaatatcaagaagatataaaaataacgcttctgagtttataacaagaaacagagcttcaatgattctttgtattgtattgctgctgctcggcggtatagccggaggagctgtctatacatggctccctcaagacttgaaaaatcaaattttttcatatatgcaaaactacttccaaggttctgttattattggagtatcacattccgaaatatttaaaactgtaatctatgaacatattattaccgctttcataatttttctatcaggaatgtttatttttttatcacctctaagctttatcagactgtgttcaaaaggatttactataggattctccctaacatttcttgtttcaagatatggggcaaaaggaataatatttggtcttttatcaattatagcatgcaatgcattaatagtcactgctatgatatggtttacaataactgcatctgaaacaggaaaaactgcaagacacggacgcaaactgaataaattatcccgggataaatacacaaaattcattccggtcggaaaaaatctgcttaaacttcttctcagcctagtcatatttttggcaatagccctgatttcagctcctattgaaagttttgtaggtccaggattgctaaaagcactttactctatttttagcaagtttgcataatttttaaacatcagaataatgcctgaacttattaggagacactccatactcagctttaaaagctgtagcaaaataattgctgtcattaaatccgcagcgtgtagcaacatctgttatagaactatacttattgcttttaagtaatttaactgcctcacgcaagcggtatttcgcaagatattccttaaacccaaaacctgtctctctcttaaattttttagaaaaatatgttgggctcatatttatatagtctgctgtcatatttaaagttatctgacggttataatttttacatataaaatttatcgcctgctgaataacctcatttagaatattatcactgtctcttgctacatgtgatttatttttatatgttcttaacatatctatcaataattggtttattatacttttcagcacaatgtcagacatgctgtcaggagaagttacttctttatgaatatttgaaaactttgtttttaactggttcctgacaatttccggaatatgtacaaccatagaatcaatattttttaaaacctgagaatcatcacaaatatcaaataactctttaactatgctgtccggaaacattaaaacagtccttttgtgactagtattatccccagccactgtcctatgtattcttccgcttctaataaatactaaacttcctgcactgagattatatagctttgtgtcaacaaaaattttactgcttccttcttccaaataataaatctcattgtgtctgtgaaaatgcggatttgtctcataatttctctgccgtcggacagttgagattgttatcttatcatcctggagcattattatccctccaatcttatatcgtgtatagtatacaataaaattataattttacatgttttttatattagttttatcattcttttataaactgattaatactatttttgtattcttttggagttcttccatacgctgctttaaacatgcggttaaacgttctctgactgtcaaaacccgaaagctgacttattaaagttatattttcatcagttgtacgtatcaaatttgctgcatattccgccctaattaaccccaaatagtttcttaaattaattttaaacttttgggcaaaaatcctggaaatataacattcgcttacattaaaatgctgagccaaagaagctctggtaatcggttctgtaaaattttcttcaacatatttaacaatcttgtacgaaatatctgtcacagggtcagacggcagatgttcaagtttcattatttccattatgtacgacataataacgcatgcccaagaaaatttaacctcgaaggaatcatcaggagaaatacatgcaagagcagttttaaattttttatttatcgactccctgcttataatcggattttgaggtctaaagttttttaagtcagggaacaaatttccaaataattttggatcgcacataacaattaatacctctgaattctttttgtctatagaataaaaagaatgcacggtatccgggaatattacagtcataaccccctctgttacttcaaagtcctgattttcaatctttaaatgctgaaatcctttatatacatatacaatttctatatatttatgcatatgctcaggaaaatcaagctcgtaattgttatgttttacggttaagtcagattttctaatctcgtatgccggaagcattttccttacctccaatccagctatattttgtctaaaacttcatacaatttgactttaattatagcactaaaagtgttatagttcaagtatgaactaatatattttcaaggaggaaattttatgattatacgaaaagtattatctgcaatcaccgcagctgcaatgctggcaactacactgccgattacagttgcatttgccgacaatggaaccgaaaacaaaccaaccgaacaagctgtatcagctgttgaacaaatcagcgaacctattatggaagacgctgaaattgctgaaacgcttccataccaggacacttctctttcatttgaggaaagagccgctgatttggtagctagaatgacgctcgaagaaaaagtttctcaaacaggacgcagcgcaccggctataaaacgtttgggcgtctccgcttataattattggagagaaggtatacatggtgttgcaagacagggtaaagcaacaagtttcccttcaagtcttgctatgtcaaatacctgggacagacagcttgtatatgaagcgtctaacataacatccacagaggcaagaggaaaaaacaataagtatgatttatcatactggaacccaacaataaatcttgcccgggacccaagatggggaagaaatgaggaatcatacggtgaagacccatatcttacatctgaaataggtgctaaatctgtagagggtatgcagggtgaagacgcaaaatatcttaaaacaatagcaacccttaaacattttgctgctaataactgtgaaggcgaaagacaaaccggaacatcagttatgacagaaaaaacttttagagaatattatacaagaacatttaaagatatagttgaaagctctaatcctgcatcagttatgagttcatataacgcgcttaccataagcagaaacggagaagttttttctgactatattgcttccagcgctaacaaatatctgctgacagatttattgagacgcacatggggattttcaggttatgtagtcggagattgcggcgcgtgggaaaatcttttcggaagacaatctatgagacaaaaactgtttccggattggaacttagacgatataactgcgcctatggcagtatcaaaagcttttaatgccggaaacaaccttgactgcggttccagagcgcaaggcagtacattcgaatccgttgaacagggatggatgagtgaagagactctggatgtagctgtatatagtctgtttcttgctcgtatgaaaaccggcgaatttgattcaaatgttgaatatcaaaaaataaaaagcgatgtaatagaaaaagacgagcatgttgcaaaagccgaagaagccgctgaaaagagctgggttttacttgaaaacagaaataatacactcccactcaaaaacacagtgtctaatgtggctgttgtaggaaatcttgctgacgagctgacacttggtgattattcaggagaaccaaccaaaactacaactccatatcaaggtatgaaaaacgaaatccaaagcattaactctaacgctaatgttgaactcatcggaaatgtaagcgacagtacgccgctgtttaatattaaaagcataaatcttgttcttgaagatggaaaaacaagaactgttgacttgtcaaaagcgacaagcgttagaggaatgactttatcaggttcaaaccttaaagatgtcactaaatcaggcatggctgttgtaaaagatgttgacttttctaaagttacagacgtaaaaatagaagcagcatcaatgcccggtatgcctaaagcgtctgtaaatatcagttacagcaatatgacgcagactgtagccaccgttgacatagcaaatacagacagtcctgatacttatgttacaaacgaagctaaatatacaggagctgacggtggatataactccacagctgatatgtatattacaataaacgcaagcgctgacttctcagtagagaactacaagaattctcttgacgctgcagattatattatagcatatgcaggaacaacaacagcagattccaaagaatcaaacgacagaagttcaatagaccttcctatatcacaagcacatgttcaaatgatttgtgacagttatccagaaaagaccattgtagtaatgtctactgtaggacaaatcaatgcagaaccatttaaagataaatgtgccgctatgttatggacttcatataacggacaaacgcaaggagaagccttaggaaaagtcctgaccggaaaggttaatccatcaggtaaattaaccaccacatggtatacttctgaagatctacaaaagatgcctctcggctcgccaaaacaaaatgttaatggcgttgattataactttacaaattatgaaatagcacaggcagataattatccgggcagaacatatcaatattattcaggaacacctgtatatccgttcggctacggcacaagttatacaaattttgtatactcaaatatcaaggctgacaaaaccaacgctgacgccaatgatactgtcagaattactgcagatataactaattccggttctgttgacggcactgaaatagctcagctttatgttacagttcccggagcagacggaaaaactttgccattaaaacaactcaaaggttttgagagagttgaattaaaggccggcgaaactaaaacagtttcatttgatttaaatatatctgacgtatacttctttgatgaaataactcagtctaattatgtagtaaacggtgcatataccattaaagttggttcaaatgcaaatgatgctaatgctctttctaccactgtaaatgtgagcggaagcattgctaaaaatgttaaaaacgtacacgcagtacctaccggtataaaactttacggtgctgtagctagtggagaaacaagtgttgcacctgccaactatattgaagcaaacgcatcagcagcgcttcaagacgatacgctgataactgatttatcgacactcagcaatgctacagttgcttatacaagttctaatgaagatgtagccaaagttgacagcaatggtaaagttacagcttcaaatattgagggaacagctttaataacagttacaattatacctcagtcaggaactccggtgacggattctttcccggtagtaacccaactaaaagaaaaggttgctcctgaagttaccgcttcttatttagaaaaactggaaaatgcgtttaaagcatgcccggaaattgcttatcttcctgaaaactggaaaacaattttaagtgtttataacacagcaaaaactgctattgaatcagaactcttagaagaaaacctgccgggcattttggaacaagcagcagcagacttaaaagctgtaccaactattgaattagctgaaacatataatataaaatcaacgaatccgagcatattggtagataatagaattgattactcaaaggcaggaattggtgaatatacagcttccgaaaccgaaatatccggaacaatcactgttgattcaccatgcacagttgatttaaaagcattaaataatgatgtttctgttgataattcaaaactgatttggacagttgaaaagcttgacagctcttcaagaaaagctcctgaaatagatagctcaacaggaaaactcatcatatacgaaaacggcgtatttaaagtttcagcaaaaaattatactgacaaagagtgcggaacaattattgtatatgccaatttacaaatcgaaggtgaaagcgctgacaacggcggcggtgccaatttaagtgacgcaaaacaaggtgccagcggaggtcttaacgccggcagcacaaaaaattactggttaagatttgatggtgtaaaacttgataaactcaccgatataactttccgtgtatcacagcttgaaacaccaagtgaaattaatgtatcactcagtcctaatacaaacagaattataggaaccgctacagtgcctgtaaccggagcttggacaaactggactgaggttaatgttggaattaacagaaatgagctttcaaaactaaatcttgatgctaacggctgcggaacaatttatgttcaaactaacacatcaaacttagattttatgaaacttaaccacataaatgcagatatagatgttgttgaccaacccggaggaaaaaccaaagtgagtgttccttatgaatccggcgttttggtagctgcttcatatgaaaacggcgcacttaaaaatcaaacagttcaggagttctctgcacccggtgattatgtttttgacggcttcaaagaaaacgatgaggtaacattctttacatgggaaaacttaaacaatattactcctcttgataaagcagtgaaacatgtatatcacgaacctgaagtaaaaacactgacactatatcgtttcgacgatcctgcttttgactcattctttgaaacatctgacggaactaaactgaccagcggtaccggcatggatggtatcggcggatggaacactgaggcaaaagacagaaaatatacttataatggcacttcttatacttttaaaagaggtctaaaaggcggccgcggcagtgagacacttaaatgtgtatactttactcctgatactgacggagcaatgactgtactatttgattcaagctcagacagatatattgcagcaagtcaaaacggcgttgaattaaaacaacaatacggaacagcttccggtaaattgactgcacttgaagtaatggtaaaagcaggttcaccggtatatatctatggaggtggagctaataaatcaatatttgcagtattctttgatactgaaaaaactatagttgaatcttcaccgtccccttcccctactgcatcgccggaaccggaaccaacaccaaatataacatatactagaaaagttgaatttgaagattacaataaaggatggtacgatgccggtatgactaagagttcagtggcagaagccagtggaggttatgttatagacaataccagaaacaatgatactttctacttcggcgaacatgatatgcaagactttgcaattatagaattgatagccggaacaaaagaaacttcgcctgtaaatgttgaattttttgctgttgatatggcaggtataaatgttgacactgcttcacagagcgaaataaataagcatcttacatctgcaaacagcattggttcagctactcttattgcaagtacaaaaaactggaatgattttaaaacaaacgtaataagaataaaatctggacttacaggaaccaaagggatatttatgaaaggaacaactacaggaaaatatttgggtaactttgattatatgaatctcatgtattcagacccaaatataagcactgcttcatcaccagaaaatactgttatattgaatgcttcaaataactctgtggaattaagtgtaagcggtgataccattgctgtaacaaaagacggtaaatcaacacaactcaattataatgaggaatatcaaaaaaatgttgattttaagaaattggcagtatggaataatatgtttactgctctggtacaggatagagaaaccggaaaaactgatataatagccagtcctctgggaagtgtttggaatgaaataacaccatccgattttgctgaaagtgatattgatttaaaaggtaatgagaactttgttataaatgatttcatagttatagatgaccagctttatttaggatgtaacgacggaatattaataacgatgacttcttgctcaaagtgttatactttaaaaaaggctgctgatttcaatattgaaagtattgaatatgataacgaaaaaatctttatcagcaataataatgataaaaaagaaatagatttaagcagcgcaagacaaaaaaatataaaagctgatgaagctttgaaactttcagaaaaaggtgcagtacttgcagacgtcagaagcaaagaagaattttcagcaaataatttcagcggttcaataaatgttcctatagatgagtttgaaacatggctgcagactcaatcaaaagatgaaactataatagtatattgttcatccggagcccgctctgctaaggccgttgagattgctgaaaaacttggatacacaaaaatatatgacttaggcagtattgataatcttaaataacaaaaagtaactgctttagtaaaacacaaaaataccgccggcacttcaatgcccggcggtatttatataataaaagtggttctatgattaaaaaattagatggcaaaaaaacaaagattttttctaaataacgcaagaagtttatagaatataataaaaatatgttctataatattaacctaggtaagaaaataattatgggggtaacgttaagtggaaaaacttaaacgaatttttttagtaaagaacaaccgtgatttaattttggaaggcaatgttatacgagccctattgtttttagcaattccaattataatcactaacttcttgcaacaaatgtataacctgacagacacattctggctcgggaaaataggcaccatacctcaagccgctatctcaatggtatcaccgattcaaagtactatgatgagctttggacaaggaataacaatggccggctcaattttgatggcacaatacataggagccggacgaatgagaagcgctaaatcaatggcaaaccaaatttttgtttgcgctatgatattttcagtattctgcgccggcacgctttttgctctaacaccaataattacatcttggatgggagcagacggcgaaattttttcacttggcaatatttatttacgtatagttatcttggatactcctttattatttataataaacattttcggagcggttaatcaatctcagggaaatacaatattccctatgcttataaacttcctgggcattgtaataaatatgattctcgatccgctgtttttaatggtctttcatatgggtattggaggggcggcaattgcgacccttggagctaaaattccatgtgcgataatcgcacttaaatacttattaaacagaaataattctatatctttggatttaagatatatgagaccaaaatggaacaaaattaaaaaaatcatttcagtcggtcttccaaccgcattgggaagcagcgctatgcagtttggatttgtacttatgtcaaagaacgtatatgttttcggttcatccgctatggctgcatatggcgttggaaataaaatcaacggaatcataactctgcctgcaaacgctttgggttctgctacctccactattgtaggacagaatttaggcgccggacaaataaaacgcgctgaaaaaggttataaaacagcaaccattgttggcatgggactgctttttataatgggtatgattctatcaagacccgctgtatcaactattattgtaaacatatttacatctgataacactgttgttccgatggcagttgattttatttctataatgtcattttggtgctttactaacagtgtatataactgtactgttggattattaaacgggtcaggaaaaacaaaaattactatgattatagaagctacaagattatgggtatttagatttgcaactattttcttctgccaaaatatacttcatatgggtgtagaaagtatttggtattctgttgttgtaagtaatgggctctcagcgctcatattattaatagtatacacaacaagaatatgggaaaaagacagtcttggagttcgcagcgtaagtcctgctaaacataattaacaatacataaatttatactatatgtttaaaataatgtttaattgttaaagcaattttgttataagaaaaattactcaaaatatttatatctgtaacttataagaggagcgttaatcgcgctcctcttaatgttaaaataatattattatggttttgtaactatttaaagaataaatgtactcctgtgcctgccgccttatgtagtgcatgtcggtaccctaccgatgcttgctgattaatgttccttgattatatattgttttccatatatttcattgtgacaagttattttttatttcatcattaactatattttactacattcctcgcctgcgcgccttacgtggtgcctgtcggcaccctgccgatgcttgcttgttaatgtatctttattatatatttattttcaatatattttataatgacaagttgattttttaatttaatcaataattatattttgctgcattcctcgcctgcgcgccttacgtggtgcctatcggcaccctgccgatgcttgcttgttaatgtatctttattatatatttactttcaatatattttataatgacaggttgtttttatagttacgtgaacaattatattttgtttaatttgtatggcttgtttcttacgtgattgttgtcttccacttcatacacttgattttataataacagtttattgaatgttcactttttaatatactatataaaataatttactgtttaagtaattacataagtagataacatctgtaatccaaatccgtatgatttatcatctatctagattaaaatacattaataatatattttatattattaacctctttataaaaaaagacagcagaatcaatccgctgtcatttttatatcatatttattaattctctatttatcaaatctttcaattatagctttaactattctttcagaggcatgaccgtcaccatatgggttaaccgcatgagccattttttcatactcgttaacattttctatcaattctttagtcatattataaatgttatcctcattaacgccggcaatttttactgttccggcgtcaacggcttccggtctttctgtttcatttcttaaaaccaagaccggcttgcccaaagaaggtgcttcctcctgcaaaccgcccgaatcagtcaaaaccaaataacctcgctttatagcattatgaagttcgtcagcatttacagggtctataagctttattctgtcatgatttcctaaaatatcaaatactacttcccttaccgcaggatttaaatgtacaggatatacaacctcaacatcatcaaagtcatttactattcttaatactgcacggcaaatgttttttaacggttcgcccaaattctcacgcctatgtgcagtcataacaataacctttttagtgtcccaatttaaggtttttagtccttcatcagaaaactcatagtcatctttaaccgtagtttttaaagcgtctataacagtgtttccagtaacatatatattctcttttggagtattctcagataaaaggttattttcatttctttttgtaggagcaaagtgcatgtccgcgataactcctgttatgcggcggttaatctcctccgggaatggaaaatatttatcataagtcctaagccccgcttcaacatgccccaaaagaatttggttataatatgcggcaagacttcctgcaaaagtagttgacgtatcgccatgaaccaatactacatccggcttaactttcttcattatttcatccaaaccctcaagagctctggtagcaatattaactaaagtttgtctctcgtgcataatatctaaatcataatccggctttatatcaaaaattttaagcacctgatccaacatctcgcgatgctgagctgtaacgcaaacaattgactcaatcctgtcactatttttttcaagttctttcaccaatggcgccatttttattgcttccggtcttgtcccgaaaattgtcattaccttaatcttcttcattatagttatcctcctcggtcaactgttcgtcagcattatagttaatatattcgccaggatcatgaagctctcccataacctttattgaaaccaatataatcaaaagcactgagcaaattaatatcaatcctctgccatatccttttatagaaataactacagcagtcatacataaaacagcggtcaaagtatataaaatagttacaaccctgcgctgagaaaatcccatatccagcaaacggtgatgaagatgtcctctgtcagcctgcataggagaatgaccggtaagcacacgtcttataattgcgaacatagtgtcaaaaatcggcagtcccaatattaaaataggcactgcaaacgtgataacagctgacattttaagcataccctgcactgatatacaagccaaaataaatcctaaaaacagcgctccggtatcacccataaatatctttgccgggttaaaattatacggcaaaaatccaaatccagctcctgcaaccgctgctgtcaaaatggctacattgagattatcactgattaaagtcagcgccagcaaagctatcgaagatattgaagaaactccaacggctaaaccgtccaaaccatccagcaagttaaccgcattacatatacccacaatccaaaacatagtaacaacgcatgaaacccaatagttcatgactatataaggtccgccgaaccatgcgctgaaagggttggcaaaatgttcaatacgaactccgcagtatactacaacagccgctgccaaaatctgacacacaagcttcacaataggcttcatttcagtaatatcgtcaatgacgcccgttgtaacaattatagcgcatccaattaatatgcccataacttctatatcaattgtagcaaaacaagcaacgcttactataaacccatagaatattgccaaaccgcccatcagcggaatcggctttttatgtactcgtcttgcatctttcggaacatcaatagcattcaccttatgcgccagcgatattaccataggagttgcggaaaacgctaccaaaaaggctacaacaagcgcaagcagcacatatatattattatcgaaaatcataggaaatcctcctgaattgattaaggttcaataaaccctaccttacgatatactttagacaaagttttcattgctgtcctatttgccttgtcagcgccggacttatatacttgcttaagataatccttattcttcataaggtcgttatacttgtcctgtataggtcttatagtatccacaacagcctctgccacagcatttttaaagtcgccgtaaccctttccgtcaaactcggcttcaatttcatccatggttttaccggttactgcagaataaatactcatcaagttctcaacgccttctttgccttcaccgcgtttcacctcactgcctgaatcagtgaccgcacgcttaattttcttaacaattttatcaaccgggtcaagaagaagaatatatccattctcattagtatctgattttgacattttttgcatcggctcctgcagactcataatgcgagctccgacctcgggtatatatggctcgggaattttgaaagtctcgctgtacgcgttattgaaacgattcgctaaatccctggttatctccaaatgctgagactggtcgtttcccaccggaaccaaatctgcctgatacagtaaaatatcagcagccataagagacggataagtaaaaagacctgcatttaaattattagcatgtttttttgccttatccttatactgagtcattcttgaaagctcacccatgtaagtgttgcaaatcattacccacgccagcatagaatgcgccggaacatgggattgaaaaaatatagggctcttttccgggtcaagacctgaagctataaaaagtgctaataaatccatagagttttttctaaaatcctttggttcctgccttacagttatggtgtgcatatcggcaagcataaaataacactcgtattcatctgtttttgacagattcacccaatttctgagcgctcccacataatttcccagtgtcaatgcgccggatggctgtataccgcttaaaattctcttctttgtatcttccaaattattcacctacttcttcttttagcaaatcacccaaagtttttattccgctttctatctgctcttttgacgcagttgaataattcattctgaaactgctgcaaacagctttatcatcaatcatagtagttgagccaggtacaaaagcaacacctctgtctaccgctttcgccataatagctttggtatcgtatccatcaggcatttcacagaaaaggaatataccgccttccggaacagtatgactaactgaacttgggaaatacttgtccatgcactcgcacataaacctgcacttttcaccatatgtctcttttagttttgaaatatgctcgtctattgaatattttgttaggaatccatatacgaccatctgagccaaaacatttgtatgtacatcctgaacctgcttacagataatcattctttccataagctctttatcgcatgaagtgaatccaaccctgatacccggagacaatatctttgagaatgaacccagatacacaactcgtccttgagtatccagcgattttattgttggaacatcatctcctgcaaacctaagctctccgtaagggttgtcctcaaatatcataaagtcatactgttcagccaactcaagcagtttttttcttttctcaagagacattgtgattccggacggattctgaaaagttgcaattgtatataatatctttatattgctatgctgtttcaaaagcgcctcaagctcttccatatcaattccatcgctctgaactttcactccatatatttctgcattataagaacggaaacaattaagaccgcctataaagcttggctgttcacagacaacagcgtctcccggattcaaaagagattttgaagccaaatcaattccctgctgtccgccgcttactattattgtctcattattatcattctctttaacaattccttgtgaaacaagacggtttttaacccaatcacgcaaaggtgcatatccttctgtcacaccatattgaagcgctatttttccattattttttaaaacgtcggcagccacttctgaaagctcatcacacggaaaaagctccgggtcaggagctcctcccgcaaaagatattatgccaggcttatcaagcagtttaaaaatttcacgtattgctgacgcttccaaatcctttaccttatccgaaaatttagttttgatatccatattcgttatgtccttctttcatataggttttttctattaagattacaaggttatataccctgaatttttcttatgttctctcttcttttcttccggctgtacgtcctgttcttcattttgctcagcattatcactgcaagacactattttatgcttgccgcagcagcttgagcctgacaaacatttttttgcaataacaatagcagcggttattccgccgattataccggaaataattaatattaaaccaatactattttcaataaaatcttttatttttgcttttcttcggcggcgttcaatctttttcttttcttggcaatacttgaactttgcccgctcttttgcgtcacccaaaaaatctgcggtttttttaacataaggttcagcaaaagacacagctgaatactcattaaaatgtttcatatttattcctcctgactctctatttcggcttcctgccgccgattattttaaacagtttcctcttccaccaccgcaacatacggcagatttctgaatttttccgcataatccaatccgtatccaactataaatttatcagggattgaacggcctatataatcaggttcaaactcaacagaacgacgctccggcttatcgaacattccgcacaccttaagacttttaggactcttgccctttaaatatccaaccagtttctttaacgtttttccggtatcaacaatatcctcgattaccaaaacatcattatttgaaacattaaattctttaaccgattcaaacttaacttctccacagcttatatccgaatccccataactggacgcagaaataaaattcaaatctatatccggaatttttagtttgcgtattaaatcggcagtaaaaattacagacccctttaaaacacaaattaaagtaaggctttgacaatccttatagtcactgtttattttatccgctaattctgaaactatcccggcaatatcattttctgtaaacattatttctttaatcttcatatttttcataatgtatcaccaatatatttttagtaaaacgggtcattttatatttttcattagctcttattccaagtatggctaatatttctccgttctcattgcaaaacagtggaacgctgtctcttttttcgctccgaattttcaagtcaatgaataaatttttcaattttttacttttgccgttcttatacacggcaaatttatcacccggacgcctatttctaacataaaaccggcttgtcgaaaacgtctcagtaacgcctaacttatcggcgtcaagtgcaatatcgccgtcagagagcttcagtgcgtttgaattcactaaaatataagatatgtttaccccggcattttttatattatataacttatttggagtaacttcaatacaaaaatcaccattgttagaagaatttaaatctttttgagcattttcgacttctgaacaaaactcaagccagccataacgtttaacaactctaagccctcccggtaggtttacagctgctccgccattgtcactcattaaagccagtacagaacttatatgctttttctcaagagaataatcctgccccatctcatctcttgcgcaggatataataagtcttgacaaaactgctcggctttttataagtttcatagagttaatatgtagtgctttgaattttcccccgggcatcggagaccttaagcgttcataaagccttgagacatatccgtctataaactctccgtcatcatcaagattattggccagatttgataaactgtctattataccgggattaaaatccttctctatcattggtattaacttgtgacgaattctattcctagtataattgtcatcattatttgtgctgtcggttttatattctaaaccggcttctgcacaatacttttctatatcggctcttgtgatgtcaagaagcggtcttataacaccatcttcccttttatattttatccctctgagccctgataatccgctaccgcggattactctcattaagacggtctccgcctggtcattcttgttatgggcagttgctatataatttatatcattctctttacatatgcgctgaaaaaaattatatcttgctgctcgtcctgcttcttcttctgtcataccatgctctaaagccattttgggaatatcagcatgttctgtaaaacactcaacgccaaactcagaacacagctttttaacatattcctcatctctatttgcttcgtcaccgcgtatctgatgatttaaatgagcggcatatattttaaaattattactcgtttttatttgattcaaaacatggagaagacatacagaatcagcaccgccggatactgcaacaagaatggacgaaccggtttcagcaagaccgtgcacattgattgtatttacaattttctttgtcaccgatgaaataatcacagggacatcatctgcaaaattattattcacgcataccgctccagttagcaaattttgtatattctccaagccacgacaagaattcgcttccgacttcaccgtttctatgtttatcaaattttatttttgtcttatttggctcttcacaatcttcattatagtatccttcacgatacaaaaatattaccatatcagcatcctgctcaattgagccggattctctcaaatcactcaaaaccggctcctttacatcacgtttctcaaccgaacggttaagctgtgacaacgcaataacaggaatccccaaatcatttgccataaccttcagagttcttgaaatatcagaaacttcctgctgacgattaaccccgctcatacctgaactcataagctggagataatcaatgattaccaagtccaaccccttctcaattttcatctttctgcatttggctcctatttccgtagcagtaacacttgaattatcgtcaatataaatttttgtgtcagataaagctgccaaagcttcacccaatttcggccagtcgtcatcttttaaatcaccgcgctttatgcgctcggcgctaacctttgcctgcgctgagagcatacggtttgcaatctgtattcccggcatctccaaactaaatatggcaacagcagctctgtccattatagctgcattctgtgctatattcagcgcgagagcagacttacccataccgggacgcgccgcaatcaaaataaattcagcagggtgcagtccggcagtacgtctgtcgaggtcaacaaatcccgttgtcaaaccagtcacgctctcatttgcatctgaaagcttctcaagcttttcaatactttcatcaagataaaccgatatatgagacaatcccgttgtattacggttctgggttatatttattattccctgctctgcgcttccgattatatcgtcaacatcatcctccgaagcgtagcagcgcttagtaatagcttctgaaacatttataagctttctaagctctgatttttcacgcacaatattggagtagtgtctgacgctgttttcatcagtagacggaaccaaatccataagtttaaatataaaatcaagaccaccgattttatcaatacttccccgcatttccagctgtctttttattgtaacaaaatctataggctgacccatgttaaacaaatcggttagagtttcaaaaagttctctatgtctttcaatataaaagtcacctgaggaaataaggccgatgacatcagggattctatctcttgaaattatcatcgctcctaaaacagactgttcagcttcatcactgaaaggcatgcttctaagctccgaaacagaattttctgaatcaccgttatccgaataaatatttaagtcttccaacccctatttcaactcctaacctcttaaattcaattcataaaaaaattattcctctgttacctggactttaaaagttcccgtcactccatgatataatgaaacattgacgtcacgagtaccgcatgtctttattccatcagggagatcgatttttctcttatccacctcaatattatactgctcttttaaagcctgcgcaacatctttagacgtaattgagccaaacaattttccctccttaccgctcttagccgtaagcttaaccgtaaactctttcattctatcggcaatgttcttagctttttcttcttcttgattacgtctgtattcttccgctccctttttaccctcaagctcatttatagcttgtttagtggcaaccttagctaaccccttttttaacagaaaattatttgcatatccatcgctaacattaatcaaatcaccctttttcccctgggctttaacatcctgcgttaaaatcactttcatattatctattcatgaacaataaacttgtccatatcctccttccaaatttatatataattaaaatttattcacggtcgtccagcacatcatctatcgctttttgaagctgctctaatgctatatccatatcttggtttgaaagctgcgctccggctatggttatatgtccgccgcctcccagccgttccaaaatcagctgaacattaacggtctccaaagaacgcccgctaataattatcttgtgaccaagccgggctataacaaatgaagcctctatacctgatatatttaaaagttcatcggccgcttttgcaaccaacacctgcaaatctttgccggtatcttcacaaacagcaacagctatattatctcggtatatttttgcactgctgataaccttagacaatcttacagaatcccttatatcagttttaaacaaccttctgatattaaccgggtcaacgcccattcttctcaaatacgcagccgcttcaaatgttctgacaccggttttaaaagtaaatcctttagtatcaaggaagattccggcatacagcgcctcagcttcctttaaaccaattttaggattatcctgaatatactgtagaatttctgttaccatttcacatgctgaagacgcatacggctcatgatatgtaagcacagcattgtcaataaaatcttcagaacggcgatgatggtcaataagaactattgactttgaggctgacaaaacctcttcaaattcaaccatgctgcgcctgtgcgtatcaactacaattacaagtgtttgcttatccattaaggtcagcgctttatcacctgttataatattattcatatatttaggatcattagtaaaattattcaaaagcaattttgcgttagtattgttttttctcataacaatataggtgtctacgccgcggctttttatcgcctgataaagtccaatagaagcgcctaaacagtccatatcaccatttttgtgacccattatcataacgcatgaacactggtcgatggcttcacgcaaagcatgtgccataaccctcgctttaaccttagtgcttttttcaacctcccggcttttggctccgtaaaacttataggcgattggtgattttacaactacctggtctccgcctctgccgagagccatctccaaagcaagattagccatcttattgttttcatctaaagtttctccgcctctgcctgttccaatactgagagtcaccggaattttattctcaagatttatatttctaacgtcgtttaatacattatacttttctttttctataatatcattatattccttattatgaaaaaagactaggaacttttctctttcatatctcctggatacaccattggcatttgaaacccatgcgttaacacacctctcaatctctccaagcaaagctccatgatttgaattcggagtctctttaagaacctcgtcataattatctataacaacaagacactgaacgcactgcttatcgtcaaaatcctgctttaattccataaaatctgtaatatccacaaaatataagcctgccaatgtatcggaaatcaagtctgaatggacagctctgccatttattaaatatgttcttccattaaattcaaattcatctactacatttacctgactctcaagatatctgtttatggaaagattattgaataaatcctgaatatactctccataatgcgactctctgccaatcatatcaagaaaattatcattactccattttatttctccctctgagtttataactaccataggatgaacaaatgttttgaccgccgtctgtgtgactgcgtcaacacaaaaagagtaactttgcatataatgataaaaccgtttcttcctggattttaaagttacgactccatacacaagcagcgcaatagaaaataaaatttccacaaatccaaaggctgacatatcatttccaggtttattattgaataatatagtaaataaaccaaagaggaaaacaacaatacagctgacaacagtgttaaaaaaaccggatctgatttcagaaatagtataatcttttgacttattaactttcactgtcatcaccagcctttttcaacattctaatatctatgtttgcatcaagcatacccgcaaacattaaaatatagaaaattattgagataaagaaatatcccaaaataagaatcagcaaatatatcccaaaccttgaataaccgcttctgaactttttccgcaaagaaaaatccaccagcgataaaccgtcaataacaaggacaaatgataaaaccgcaacaacgttttttagagctaatgtatatatcgaactgtcatttgacataaatgacacaatcattaaaagaacagtcactacgctcaaactcttaggaacttttatcatatagaacctaacatactcgtaattcttcactctaaatcttttcataaaaaaaatacaaagagaagttataatataacccattactgaagctgcaaccacaagtattgttggaaaataagttaatattatttctttagtttgttttaacgcctcgctgactatatttcccatatctgcagaattttcaacagatgaaatatacgtgttcatagcgccctgaacggaattaatcgtctcgtcaagcattccggcaattccgttttctccgcctgccataacgttaagaatcatgacatctaagacaagaccaaataaaacagcagctatgccggacgccagcgtcacatagtatctgcagttatgcgacatacaataaccgattactaatcccggaagcaaagtaatcagtcctgataacggacctgaaattatatcaccggtcacaataaaaataagcagcaatgacgcaataaatgaagcggcagatatatatacgccttgccgtatcatcaaatatgcgagaggtataccgcagacaaacattgccagcgttctgaaaacaggaacataaatccccataaacatcaataaaacagtgagcgcagcaactattgccccctcacaaaccgctcttgcggtaacttttttcatattcagaccttcttgtaattaaagattgtataaaacaaatatatcaaagagacttaagaagtttagacaaatctccataacgtctctcaataaaatgttcactatcaatctcagattttagtttctgcttcataacgtcatttatatcatcaaaatcaacacccaatctaaacgccaatacatatgcgacgtttaaaaggcatgcagtatcctcggtgagatttgtaagagtttcacaatctgtctccgctgaaatatcaccaaataaatctgttactttttgaagaagctctactttaagcaattctactgttttaatattattcgctatatcaatttccaaaccaatcaccctcatttgactacaaaaataacaatgtaacttattttaccaaacttttgcccttatttcaagtacttttcaaaataaatatgtgacaaaaagaaattagcacgcatagtatgattgtagaaaagggtgataatatgagtgaaaatagtgaatatcaaatttttccactaaataaactggttccgggcgagacagctataatagtaaaaattgattctgaaataaaagaacataaaaaccatctaatcaatttaggctttatgcccggtgaaaaaataactccggtttttaagtccccgctgggagatccgattgcatatatcattggcagaagtattcgcattgctcttcgtgagagggaggcaaaaaaaatatttgtgacaggagatttatatgaaactgaaatggtttaaatccggaaacggagaaaaaaatgcggctaagcttactctttaccttctaggcaatcctaacgtaggaaaaagcacagtttttaacgctttgaccggactaaaacagcacacaggcaattggtccgggaaaacagtagacgccgcattcggaaaatatacatataacaatatcgaacacaaaataatagacctgcccggaacacatgctgtcaactcctgtttttcagaagaagaagttacaggaacagaaattatgctgggctcaaaagattcacaggaatcagtctgccgctcaaccactattataatcggagacggaaccagtcttgaaagaagtatcgggcttgctctggattatttagaaaagtgcggaaacaacgctatattttgtgtaaatctttgtgatattgcgaaaaaaaagggtatagaaataaattttgaaaaacttcagaaaacacttggaattcccgttatcgggatatctgctaagaaaaaatctgacatcaattcactaaaaacattaatagatgattttatgctgaatccaaaaaatattaaaataaaatccgggttagacggagacgccgttaacttcaaaaatgactgttcttcttcaatctccggacgtatgcaaacagcaaaaaagattatgaatgagtgtgttaaatatacaaaagaccaaaatgaaaaaaactttgaatataaattcgataaaattctgacctcaaaaagatacggtataccaataatgattctgtgtcttggattcattttatggctaacaatatgcggagcaaattatccatcggaccttttagcaaaactatttgggtttttaaaaccatatgttgagggcttttttgtttatttacacttcccccaattcctgattggaattttgtgtgacggtgtatacgaaactgtaacttggataatcgcggttatgttgcctccgatggcaattttctttcctctttttacattgctggaagatttcggatttctgccgcgtattgcttttaatcttgacaaatgctatgcacgaactaacatgagcgggaaacaatgccttacacaatgcatggggcttggatgcaactgtgtcggagttgtaggcgctcgtataatgccaaacgaaactcagagaactgtggcaatactaacaaacagtcttatgccatgcaatggtcgcttcgctctgttgattgcaatgtcaaccatttttatcggcggctccatggccgttcaggtatccggagtaatacctatgctatgcgttttgtttcttatttgtctttcggttgttgttacctggtgcgtttcatattgtcttacaaaaacaatatacaaaaatgacaatgaaatttttgcactggagcttccggaataccgcaaaccggaaattgcaaagacgctgataatctcgcttgtaaaccgaactgccaaaattgtcggcagagctttattggtatcagctccgacaggcgcactggtctggcttatggcaaatatacaaattgacggcataacattactcagctacgcttcaaacgcccttgacccattcggaagatttttaggagttgacggcttcataatattggcttttatactgtctctgcctgcaaacgaaataactctgcctatacttgttatgggatatttagcgacaggttcaatgacagaaataagcgatatggaaaccttaaaaaatattcttaccgcaaacggctggacaattgttaccgcaattaatatgatgcttcttacattatatcattcaccatgtataacaacactgctcacaatatatagtgaaaccaaaagtataaaaaccgttgccttatcaatagtgattccatgcgtcgtaggtattctgctgtgtcttttagtaaaatacggattcgccataataagcctttttatgtaaattctatgataaaaattaccgaaataaaacaaagttagcctattcattagtgtaaaatgtaaaaaattgctttccaaacattgacagaagaaattcgttagggtatactctttatagaaaagatttatattcaaaggataggtgattttaaatgacttttgaccaggcagttgaaaaggttcaaggcattatgaaagacgcaaatgtaaatgatatggacagcgttgctattcagattcattttactaataaggactgcgagggaacaatgtacatttctacaaaaaacggtcagcttgacgttcaaggctacgactataaagactgcgacgccgcaatagaattaatgtatggcgaccttacaaagattttaaccggcagactcaatgctgctacagctattgaaaaaggaactgttactgttacaggaaatgctgacgctctttcagctatatcttcatgtgctaaaaagcctgcagttaagaaagccgctgctaagaaaacaactgctaaaaaggctgcatctactgaaccggctgctaaaaaagcaactgtatctgccgcaaaaccggctgcagcaaaaacaacctcaaagactacagcaaaaaagacgactaaatagattattacttaaaataaagaccatcctgcggcgaacttattgttcgttatcacagggtggtctttttaatcagcaatagctaatcatcagtttaaatgtctcaattatttttcagctttattaatcttacgctttcacttaaagaagtaaaatccttagatttagaattgtttgcacaggtgctttggatttcttgaacttcatcacagtcgtattctgaaataatcaaagcaatatcccttttcatcttatcaattctgctcattgttccgtttcttaaatcattggattcacgcttaacttcttcaatattaccaacgctcttattaacaaaacttcttacaacagctgaattcattaccgacactcctaacctgactaaccttaaatattaacagttaataaatacaatatcaatcttcagaaatcattcagaaaaccttttgtaacacttttgtaatattatagcaggttatggagtaaatgtcaataacttttttacacttttttctgcaaacttttgacagaatacttcttttcaaatatcttctatatattcttgccggagatagcctttctttcagcatctatctcatgaatcaactttataaaactccagcggcggtttgtatctgtaagcatagccttagcagatatacttattttatttttcttcataaaattcaacaccttatcaagatcgcttttacttaaaccgcataatatcataaactcaaaatcaatatcatttgaatatagaactgccggctctttctcatttgcatattcctcaggccaggcaatatattcaactttgtctccaagagaaccgttatcaactaacttaacctttatacccattagtcccaatacaggtttcattctgttatatttttcttctttaacattatacaatagaattattggtttcaaatttatcacttcctctaaaaatatttttattaaacaaaaagggtatcaaaaagatacccttttattttttaacccggaggccactgcagagaacggcctgctaaaacatgaaaatgcaaatgcccaaccgtttgtcctccatcttcgccgcagttattgactattctataccctgctttatcaaagcccttttcctttgcaacttttgagattgcagtaaaaatcttgccgataatttcagcgttattatcatcaagctcattagcggaaccaatatgctgtttcggtataaaaattatatgcgtcggagcttttgggtcaatatctaaaaatgaatacacatattcgtcttcataaaccttatttgacggcacgtcccccgccgctattttacaaaacaaacaatcatccataattatctgtcctcactttcataaataaatatattatttatttttctcctgatgttttttcaggatatcagaaacatttttcataacttcctctgttttttccggcttcttgccgccagcctgagcactgtccggctttccgccgcctccgccgcctaattgtttagcaatttcagaaatcaccgcacccgcattagcgcccttatctatcgcttcttttgaagccatagaaataagattaactttctcgccaatcttggaagcaagaactacaaaagcgttagggattttattcttaatattatcacctatttcacgcattgtgttcatatcaatattatcgtcaagaatttttgttactaccttaactccgcctatatcctcagtatttcctaaaatatcatcaacgctgtttttagcaagcttgctctttaagctgtctatctcatgtcttgcatccttaagttccgcaactatgccttcagccctgttaagcagatctgacgggttagttttcaaaacgctggaaacatcatcaataagcttactcttctcacgcatctgaagaataacattatagcctgtcactccctcaatacgtctgacgccggctgaaactccggtttcgctgagtattttcattagcccgagctttccagtattttctacatgacagccgccgcacaattcagtgctgaaatcacccatttttaccacacgaaccctgctgccatacttctcactaaacagcgccatagcccccatcgacttagctgtggcaacatcctcctcaaaacattcaacaggaatagcttccattatctttttattaactaacattcccacttttagtatctcgtcctcagtcaaaggctgataatgtgaaaaatcgaatctaaacctatattcatcaacgtatgagcctgcctgtgcgacatgttttcccagcacttctctgagcgccgcctgaacaagatgaacagcagaatggtttctctttatggactgacgtctctctttatctacaagcgtcgtaactttatcaccaattttaacaacgccgttttctaccttacatatatgaaggaattttccgttactctttttggtgtcaataactttaagagacgagtcatcgctttcaattattccggtatcgccgacctgaccgccgctttcagcataaaaagtagatctatccaaaactaaagtaacttcttctcctgcctcggcttcttctactctttcagaaccctttgcgattgccaaaacatttgaagtgcctttcagtttcgcatacccatcaaaaacagtagagccttcgacatctataaatatatcattttcccatgccgcatcatccatatttccgcgggcaacttttgactttgtcctctgctcgttgagcaaatcatcaaacagttttgttgcaacaacaaatccattttcacccatgatttcttttgttaaatctatagggaatccataagtatcatataacttaaacgccttttcgccgtcaagttccttagttccgctctgtttcatctcttccatatattgattgagtataagtattccctggtcgatagtctcatcaaatcttgcctcctcgctctttataacactttctatataagcgaagttctggtcaagttcgggataagcggtcatagactcatcagcaacaacacgagcaagtttgtataaaaacatttcgtttatacccaacatttttccatgacgggcagcgcgtctcagcaacctgcgaagaacgtaacccctgccttcattggacggcaaaactccgtcagctgtcataaacacagtgcttcttatatggtcggttataacccttaaagaagtatcaatctgattgtcctcaccatacttaacaccggcaatctcggctgctgcatcaagaacttttctaattgtgtcaacctcaaaaattgaagttgtcccctgcataatacaagctattctctcaagacccattccggtatcaatattagggtgatctaatttattatatgttccattctcgtctttatcaaactgagtaaacaccaaattccagaactccacaaatctgtcacaatcacagcctactgcacaatcaggactgccgcagccatactcttcgcccctgtcataataaagctctgaacatggaccgcatggacctgtgccgatttcccagaagttgtcatctttacctaaatacactattctatcttttgaaacgccaacgtggtttgtccaaatatcagcagcctcgtaatcatcattataaacactgacccaaattctgtcttttggcatttccaaaacttcagtagcaaactcccacgcccactttgtggcgtccatcttaaaataatcaccgaaagagaagttgcccagcatttcgaaaaacgtgccgtgtctcgcagtttgaccaacctgttcaatatcaggagttctgatacatttttggcacgtggtcactctttttgccggcggaacttccttaccggtgaagtatggtttaagcggcgccataccggcatttatcaaaagcaaacttgaatcattctgcggaaccaacggaaatgacggcagccttaaatgacccttgctttcaaaaaaagaaaggaacttttctctaatttcatttaatcctaatttctgcatctcaatacctctttattaattttatttcattaactatatattatatcaatattatttattctcgtcaatagttttacatagatacttatatatttcctcagcatggtctttcaaaatactttttgctttatttgcttctgatcggtgcccaacatcaatttttaactctaaaatcggagttccagcgtccaaaattgtcatagacgccatatatctgtttctcgaaacaggcaatatatcagttaatatagcgttaggatttgtcttttcatcaaacccttccttatcagccagacttttaatgttttctcttatgctgagcggaactctttcataaaaaaactcgttggctgattcgcctttttgggttagtttgacgcattcttcatttctataataaagtctttcaataaactcgtcttcaataagctcactcaacaggatcgttaaatcaaaatagctcataacctcttcatcccaggtaagcaattcagcaaatctttcaattgaaagcggatatttatatacattgagagtatataaaatcgcaaacttcatctcatcattttccaaaaacatatttacctctccaaaacttatttttcatattcagtatatggctttttatgtttaaaataaattccaacgagtcccaaaccggcatgagccgttataaccggaccaactttactatatataaaaccttttgggttcaccttatccctgagcatcttttccaaaatctcaactttttcaggcgcgtcagtatcaagaattataatttcattttcttccgggttttccattctttcctctgcatatccaactaaaacagacatcgcctttttaagccctctaacttttttatacgcctcaacaagtccatcgtttatcataagaattggttttatatcgagcagcgaacttatcgccatagtggttgccttgattcttccgcccttttttaaaaacgttaagtcatctacaataaagtaagccgtgtcacgcttaaacgattcattaagaaaatctataacctcgcttagcgaggcgcctttctccgctagttttgcagcttcaataacagggtatcctatagccatagcgaacataccggaatcaataacagtaatgtcaaacccctcttcttttttaagctgctctgcaaccatattagctgtattatttattccgcttcctctggcagatatagaaacatatataatttgatgttcctttccaatacgtctgaaagcagtttcaacatcatatggtgacatctgactggttgaaggtatttcatcacaggctttgaccttatcataaaactctttgatatccatatctttatctgcaactataccctcgccgtccatattaaccataaacggcaaaacttctataccgtagtgctccgccgtttctttttcaatatcggcggcacggtcaaccataaatttaatcataactttctccttatttctaatattgagttaaatgaccctgaccctgcaatccttcaaaatcaaactgacgcagaacttcatatgctataatcgcaacagaatttgacagattcaaagaacgcatgttttccagcataggtattcttatgcaatcgccataattatcatgcagcagcttttccggcaatccttttgtctctttgccgaacacaaggaatatttcttctccattgctgctctcagctttataatctatatctgaatacacattttcagactttgttgagcaataaaaaaatctgccgtcaggatatttttttctcacttcatcaaagctttgatactcatgcaagtcaagatctgaccaataatcaagccctgctcttctgacctgcttttcactgatatcgaatcctaaaggatgaaccaaatgaagcgccgctccgataacactgcatgtcctggaaatattaccggtatttgacggtatttcaggttcaacaagaactatatttaacttcaatgtttcacatctcctctatttctttctgcttcttttttggcagagttttcaacactgtgtcatacgaactgtctatcatttccataaccaactgttcagttacagcatcaattttattcaacagcaatgaattccaatgcaccttattcatatagtaacccggaattataattccgctgtatatgcgtcttaatgtttctccgtattcaggcggaagtttcaaggtgaataccggttcccccttcatttcccccagcatagcatacattttatccccaatctggaaacggacagcatcccattcttctttataatcttttgctgtcccgttctttgaaaggcaatattcttcaatccaattaaaattcatatatacacctcccggtaaattcaaaaataaacttatgcccaaaacttcctgtctaaggaacggtattgaattgcttcagcaatatgtttcggttcaatatcacggctttcatcaatatctgcaattgtccgcgccacctttaaaattctgttatgcgctcttgcgctcaaacccaaactttcaaaagcattttttagcagaccgtttgcttcctctcccaaaacacaatatttctcaatcaatccaggagtaagctgactattagaataaattcccgtgccgttatatctctcaagctgaatttttcttgccttattcacgcgcttttttattgaggcagatggttcaggcttatccttattttctaaatccttatagtccacagccggaacctcaatatgcaaatcaattctatccaaaagcggtccgctcaccttattcagatacgcatttatcttttttgacgtacaagtacagtcgtgttttttatctccataaaatccacaaggacacgggttcatagaagcaaccatcataacattgcatggatacgaatacgtcccatgcactctggttatagtcaccattccgtcctcaagcggctggcgcataacttcaagagcgtctttcttaaactcaggcaattcatctaaaaataaaaccccattgtgcgacaaacttatttcacccggttttggatttgtacctccgccggaaagcccaaccgctgaaatcgtatgatgcggacttctaaacggcctgtttagaatcataggcacatcttttggcaaaattcctgctatactatgtatttttgtagcttccagcgcctcgtcaaacgtcatatccggaagaattgacggaagcctttgggcaagcatagtttttcctgaacccggaggaccaatcaacagtaagttatgtcctcctgccgctgctacttccagcgctcgttttacgttttcctgccctttaacttctgaaaaatccaaagcacaccgtgctgcctgagaaaacatctcattcacatctacagaaaccggttttaaaacttcattaccgacaagatggtcaataagttcctgtaaattcttaactccataaatttccgctccttcgactacggcagcttcttccgcattctcaaacggaacaaatatcttttttataccggactgataagccttaataaccataggcaaaaccccggttatacgccgaacactgccgtcaagagataattctcccataaaagcacacagatcagattcatcaataaatagctgctcggacgctgttagcagcccgattgctataggaaggtctagatatgccccttcctttttcacatcagccggagccaggtttataacaatcctctttccgggaatcacaaacccaaaactgcctaatgcacttcttatacgctccttagattcacgaacagaagtatcaggcagaccgactatttcccaagacggaaaaccgccgcttacattagtttcaacacttataatatagccgtctatccctcgaagaccacagctgtttatttttgttatcaaaaaccgcaccgcctttttataataactccgcaatacttaaaattatatctcaacatacctcttatcatagtcaaccctagaaaaatatgttgaaagcaccggctcaaacaaaacaccttctctaaccttaatttcaggatgttttattgtttcctgtatagctttatatacaaaacctgccgctatattggcggcttcagtaatatcactgcctttgagcaatgttccggtcaaaacagatgtatatacgtctcctgtgccatgaaaaggcctgtttacaaatccgcagtcaaccttataatacttatcgttttcactgtcatacactgcaacgcacatagaattttccgaatccataacgctggttataaccacatctttagcgccaagctcagccaaacgttttagatagctctttatttttgcattatttaccggtccatcgggatatttttccccaataagcagacacgcttcggtaacattgggagtaattatatcggctatactgcataaatcctgcatccctgcgagcattccgtttaccttttctgaataaaaatcctctttaacaagattattatcccccataaccgggtcaaccacaatcaaagcaccgtcttcttttgattttatcataaagtccttcaaaatatccagctgtctcgggcttcccatgtaaccactgtaaacagcgtcaaattttatacctaagttataccaatggtcaataacagcctgcatttggtcagtgagatcacaaaacgtatagtcggtaaactcatatgtatgcgtggataaaactgctgtcggaagaggacagacctctattcccatagcggacattataggtatcacctcagttaaagaaacctttccaaaaccggataagtcatgaacagcacacgccctcggtattatattttttctctctgtatcttttatatcttttttcatcaaatttcaccaatccatttttaaacttgaagcagttttaactcttcatcagttaactcacgaatttcacccggagccagtttatcatctaaagtaagcttattcatttccactcttttaagctcaagaacccttcggccaatagctccgaacattcgtttaacctgatgatattttccctcataaatagtaatataaaacgcctcattttcgacgtcaaatgtgactattgccggcttgcatttatatccgtcttccaaaattataccatttctgattttttctaactcatcatcctttggaactgcgtccaatttagcacgatatttttttgaaatatgatttttaggactgagaagtttgtgagacagttctccatcgtttgttaatatacaaagaccttcagtatcaatatcaagtctgccaaccggaaaaagttcaaaacgcaaaaaattttcaggcacaaggtctattactgtcggattatctctgtcaacagtagctgacacatatcctttgggtttattaagcattaagtaaataaattttttgtatttctgaagtttaccatcaaaatacacttcggatttttcagggtctatactgagctcaggtctcggattatcagtacctatgacctcaactctgccattttttataaactttttaacgtctgttcttgaaccgagtcccatagctgatgacagaaatttatcaagtctcattctctaccctctttttattattaaaatatataaaaatttcataattctcaaaaacattaatataatgtaaagaccaacaaaacaatatcaggaggcagttatgaaaaagcagctcaaaaaatacaaatataaaataatttttatactggccgctataatcgtaataacagtggttttcgcactgttttcggttgacaatataactaactccaaaaatattgaatacataagctctttcggctgggtaacagaaacttctccaaaagatatatcacatctcaccataccggaagaattgaacgcgctgtacaaaacatactcagatactgcgtctgttgacggcagcagcctttcggaatactgcggaaaaaatgttacccgttattcatatagggtattaaatcacaagctctccagcaccggaagaatacgcgctgatgtttttgtgtataaatctcaaataattgctgcggatataacagacctatccaaaaacggaaagactatttctatatccgacaccacagacttaaacaaatagcattagtcctaaaaatacccaacatagataatattatatcataactaaacttcacatgcaagaaaaaggctgattattttcagtttataacaaaataaagtattcggctatctgtgatatagtagattccaattaatttttccatattataaaattcagcatataaaatttattaatgttaaccgtcttaaataacaaattcataaaaaatatttaaaatatttacaatttactattgctatttgtctaattatattatataatatctacataagaagtattaatataaaatatttcttagtttatattacacaattgactggaggtagtattatgacttacaacattattactaaaaaatttaatctagcggattccagcaaagaaaaaattttggataaggttagaaagctggacaagttttttgacgatgactcaaatgaatgcaaaattattgtttcagaaataagagacgatatagctgttgaaattacattcaaatataaaggcttcttaattcgagctgaggatcaaaaccatgatatgctcactgctgtagacaactgtctggcagcaatagaccgtcaaatcagaaaaaataaaacaaagctttcaaaacgcctgcgtgacagcggatttgacgattatatcgctcttgaaggtcagcctgaaaaggttgaagaagaaactgaattcaaaattataaagagaaagagtttttctgcaaaaccaatgatggttgaagaagctattcttcagatgaatatgctcggccacacattctttatctttacaaatccggatactatgtctccgaatattgtgtataaaagaaaagacggaaactatgctctaatagaaatggatgaataatcatcatataattgcccggtcttgattcaaagaccgggcaattattttacaaaattattatcatcaaattattatcttcacttattatgaaaaaagtttttatatgaaaacttttttgagtttattaataaaagtaattatattcactacaaaataaatagcaaaaaatttatagaaagacaagaaagtaatgttatccgcttacaacttacatttttacgtagaattatgcctcttttacattacagtcttttttctctattgtatatatttattgttatttactcctttatatcttgaactattctattaatattgttataatttttgatataaattactgacatattgtgatttatgtcaaaacttagggggtcattatgaaaagttttatcaaaaaacagacgttgctgtttgtattatcaacggtcacagtattatttttctgtatgtcagctgtaagcgctcttccgcccgactctgtttacaacatttctgacatgtcaacgggcactgtctctcaagatacgcaaatcggtgatttttctattattgccgctacagacggaaatactgctattgctgttgacggaaataaaaaaacatcaacaactaccggaatcaaatatacaaaaagattaaaactaaacggaaccggaaatcaaaccaacagagctataaaatttacagcttctgagcctgcaacatttatgatagaggcagcgagcgctaactcttcagctgtcagaacaggcgttttggtaaactcagccggagaaacagtcgcctcaggcgaatttgcgtcgggtcttacctataaaaaaatgactatacccgaagccggagattactggttttattctacagacagcggtataaatgtatactatttaaaacttacatatgaagttcagccgcccgacccagtctatgattttgaagatctgaacggcgttgtgcttgaacctatgaacactatttacactgcacctaaagcaagtgccgagggaaaaggaactcaagacgaaccaatgagcatagcttccgccatattaaacattgctccgggaggtactatttattgcagcggcgagtatcaatttgacaactgtttggtaatcggagcagacaacagcggtcaggacggcaaagaaaaacgcatagaatgctcagatgatacattatttaatttttcaggagaaccgtactctaacgacgttggaacgaatgctcgaggagtacagattaacggcagctactggtacattaaaggtcttgaagcctatcaggcagcagataacggcttctttattgcaggaaaacataatacattggaattatgtgtagcaaatggtaaccgcgacacaggaatccagatttcacgacgggcttcaactgtaactaattttaatgactggcccagcgataatctgatattaaactgtacttcttttgacagttttgaccctgcaaccggagagaatgctgacggatttgccgcaaaactcacctgcggcaataacaacgtctttgacggatgtattgcatataataactgtgatgacggatgggattgttttactaaaactgcaacaggaccaataggttcattagtaatgagaaattgcgtggcattcagaagcggtcagacaactgacggaaagttcacagaaaattgcgatgggaacggttttaaaatgggcggcacgaaaatcgctgttgcgcattctctttataactgtattgctttcgaaaatgccaaccatggatttacagataattcaaacccgggacctattacattaacaaactgtacttcatacaataacgcacttaaaggcggaacaaacaaaagcaattttgattttgcaagactgccggaatcaaataacagcctcacaaattgtttatcctatgcgccgcagcaaatttgttcagataagtttattggaagtatgaaaaactctgttttttataacaaagataaaaaaatatactatttttatgaagatatgccttacaccaattggaatagcaaggaaggtactattcttccttctgacacaatggaaaccgtaagcaactctacgtttgtctctgtggaagttccggaattaggggctaatgtacataagttatggagaaatcctgacggaagtataaatatgggtaactttttaaaagttgctgatggaactacatacaaagaaaaacaaataggcgctgacctttcaggcgaccctacaatcttgccaacacccgatccgacttcctcacccactccatctgcacagcctgatgttacagcttcccctgctccatcttctgagcctaagcctgaatataaacttcttgcagcggttaatgatgctgatatgaacactattgatgttgaatttgataataatacttcaattcaagttgaaccttatattgtaattgcagcttacaaaatagttgaaggcgaagaaatattatccgatatatttgaccaaagttataatgttgaagctaataactccattatattttcaaaggcattctcggattctgaatatgatattataaaagtatttgcgtggcagaatccaaattctatgattccgtttgacgcttcggttaatatatacccacaaacagcacaaaccataaactaaatttacacagaattaatatacaaaaatggtacacaattgaaccgaccccaaaatgttagactagaaatctaacgaataggaggtcggtttaatattgtgtacccttttattatactaaaaaactttattatcaaaatacttaaatttattatattagtctttagactttgacgcaactttctttaaaatggtatctataaactcatttagcttaactgagcctgtatcgccttcttttctgtctcgtacagatacggcgccttctgcctgctctttttctccgacaataagcatatacggcactttttcaagctgagcctctcttattttataacctattttttcttttctggtgtccacttcaactcttattcctaccttttgaagttcttcgctgacgctatttgcatattccatatagtggtctgaaataggcagaactttaacctgtataggagcgagccatgtcggcagcgcgcctgcatatttctccagcagtaacgctaaggttctttcataacagccaatagaagttctgtgtataacataaggatattttttagtaccgtcagaatcaacatactccataccaaatctttcagccagctggaagtcaatttgaatagtaatcaatgtgtcctctttgccatatacattttttatctgaatatcaagcttaggtccataaaaagcggcttctccatcctcttcagtatagtcgatacccatgtcgtccaggattacacgcattctgtcctgaacttcttcccattgctccggacttcctatatacttttccctatcattttcatcccattttgaaaaacggtagctaacatcgtcatcaagacctaatacttccagcatatatttcgcaaggtccaaacatccggaaaattcatcctcaagctggtcaggacggcaagccaaatgcccttctgatattgtaaactggcgcacacgaattaatccgtgcatttcaccggaatcctcatttctgaacaaagtagaagtctcattatatctcaaaggcaggtcacggtaactcctcatatcagccaaatatgcctggaactggaaaggacaggtcataggacgaagtgcaaaaacttctccctctgcatcagggtcgcctaaaacaaacattccatcacggtaatgatcccaatgccctgaaattttataaaggtcgcgctttgccaaaaacggagtcttagttaaaagatatcctctcttctgttcttcgtcttctacaaatctttgcaaaagctgaagaaccctcgcaccttttggaagcataatcggcagtccctgaccaatatagtcaaccgttctaaaataacctaattctctgccgattttattgtggtctctcttcttggcttcctcaagtttttctaaataagcattaagttcggactgtttcggaaaagctgttccgtatatacgcgacagcattttatttttttcattgccgcgccaataagcaccggccaaactttgcagcttaacggctttaagcttaccggttgacataagatgaggccctgcgcatagatcaacaaaatctccttgcttataaaaagaaataaccgcatcgtcaggcaaattctctattaactcaaccttatacggttcatccttttttttcataaactttatcgcttcatctctaggcagctcaaatttttcaagagggatattttccttaattattttcttcatctcagcctcgattttttcaaaatctccggttgtgataggagtctcaaattcaaagtcataataatatccgtcttcaatagctggacctatcgccagctttgtatttggatacagcctctttatagcttgagccaaaacatgcgaggcggtgtgacggtacgcctttctgccattttcatcattaaatgtcagaaaactgacctcacagtcgctttcgggaacaaagttcatctcttttgtttcgccgtttacatcagcggccaaacagttacgcgccaatccttcgcttatgctttttgccatatcaagaaggtttgtcccattttcatattctcttatgtctccgccttttagagtaacttttatcattttatatcatccttccttatcaaaatcataaaatactattttacaatcccaaaaacacgcctgaaaccagtgccacaaaaacacccaaaacagcaccgcccaaaacttccagcggagtgtgccctaaaagctcttttagcttttcatccttcaataccgggtctttttcttcccatgcttcaactatcatatttatcatctttgcctgctcaccggcagctcttcttatccccgacgcgtcatacataacaataagcgccaaagcacagcataccacaaacaaagcggtgtcaaagccctcagacataccaacgcaagtagctaaacaagccacaattgtcgagtgggacgacggcataccgcccgggccgaaaaatctgccccaattaatctttttatttcgtatccattcgattattcccttgataacgcaggataataaccatgcaaacaagactataaagaaaatcctgttgctgaaaaactcctcaaaatatctcatatacacatccactttcaaaattaggttggtttatacaggcaataatcgaattatttttctcttataagcagagatacagccaattcttttaggaaccaagccttatctccaaaatattcaagagctgagatagaaacctcagtatggcgtttcagaatgtcttcggctttttctaagccgagcaaagtaacaaatgtattttttccactctctttgtcgctgccaatcggttttccaagaatatcctcattgcctgtaacgtctagtatatcatcttttatttgaaatgccaaccctaaatttgaagaaaattgacttattttattaaattcttcattctctataactccgcctataatacagcctaaacttgctgccgcttctatcaatgccccggtctttttcttgtgcattaaaataagctcctgaatatcaacgtcatcccttttttcgtttataaggtctatcacctgtccgccaatcataccctttgttccagaagcctgtgacagcgttctaacaagttcaatcatagttctttcatttaaagatataaaattatctttatcggacataatttcaaaagctttatttaaaagcgcatctccggctaataaagcaatattttcaggaaacactttgtgacaggtaggctttccgcgtcttaaatcatcattgtccatgcagggcaaatcatcgtgaatcaaggaataagtatgtatacactcaagagcgcagccaactgttaccgcatcgtcaatattgccgccgaaaagctcagcacaagcaatagtaataacaggacggattctcttgcctcctgctaaaagactatatttcatagcctcacagaccatcgcatcaggtgaatttggcacagcagcaatactctgcaatttttcttcaatcaattttatataaagttccagctttttttcaaattcctttgaaggcttaaccattagttttgttctcccattcccgcaaaaggttgttcctcaatctgccctgtttccctgttctttattaatatattaattttctgttccgccgcgtcaagcgctgccgtacactgttttgtaagcttaactcccttttcaaagagctccagcatttggtcaagagttacgtctccgccttcaagctcttttactacaacttcaagttcttttaaatttttctcaaataattctctattttctttattttccatagcaatctccaaattataccgtttctatttattttattaatttttctctatttttttcacatctgcaagcaagcttccgtcactgactaaaactgtgatttcatcaccgtctgaaatctggccgacgctctttaccactttgcccgctgtatctttagtaacagaaaatcctctttgaagcgaacttagaggactgagagcgtcaagctttgacgcattcagcgcaagactctgctttttctcatttaatattccctggaacgcgttttcaaaattcttatataagctgtctaaatatatcctattatcctccacttttaccataggatttttcaaaacagtattttcactcagcatttttactctcattctgcttctttcaactatacggttagcgcatgtatacattctggaatacacattattgaacttttctctaagttcaacctgagatggcacaacaagctctgcagcagcgctcggcgtaggcgctctcaaatccgcgacaaaatccgatatagtgaagtctatctcatgacctacagccgacactataggtatatgactggcaaaaattgctctggcgactatttcttcattaaaagaccacaaatcttcaatcgagccgccgcctctgcctacaataagaacgtcggctgaatcagtatcgttaaaataatttatggcttcaacaatactctgagccgaattttccccctgcacaagaaccggataaagcagtatatcagaatatgaaaaacgtcttgacagtatattcataatatccctgatagcggctcctgtaggagcagtgacaactccaattctcccagggtacttaggcagaggttttttatacttaggagagaacaatccctcagcatccagtttttgtttcagtttctcaaaagccacatgcaggtcgcctatcccctcctgctccatatgttctatgtataactgatattgtccgtctctttcataaaccccaattcttcctctagccaaaactttcattccgttttggggtctgaagttgagcttggcagctgcgcttctaaacataacggctctcataactccggtttcgtctttcagtgacatatacatatgcccggaggaatgagctttaaagtttgaaagctcacctttaaccaatacgttatttaaaatatcatctctcgcaataacctgctttatatataaattgacctgtgttacagtcaacgcttgtctctctatcataatttacctcaaaattttacggcatcaaaatataatatgctttatattttatatacgtcaaacagagcggaagcaatccgctataatccggattagaactcgctctgtctgaatattaagtttatacatctagttttcaagctgtttttggatacttcccaaaactccgtttacaaatgaaaccgcctcttcaccggcatattcacgggtaagatttgaagcctcattaaccgaaacaggcagcggcaaatcatccatatagagcatttcaaacacacccagtcttaaaatcgccaggctgacagctccaatacgttcaatatcccatccgtttgaaaactcagttatctttttgtctatctcatcaatattctttacaacgccggcaactgcctggctgatatattcgccctgtttaccagtatcatactctttgaaaaaatcatctaatatttcgctgatatcttcaggctgaaacttatattgaaagagaattataaaagtatattcccttgcttttcttctgtccataaccaaccacagaataacattctgccccttctaaatcaaatttaataaaaacgcctattcagctttatctttttccggctcttcgctcaatctatcctttaaatcttccaagatatcagaacctatttcaacagcttcctcagctttatccttaaccttatcggcaaaatcctcagctttatctttagcaatatcagctaagtcttccgccttatctttagctaagccggttaaatcttctgctttatctttagctaaatcgacaaactgcccggcttttgttcctgctttctgaacatagtctgactccttgtcaaccacttctcccgctgcttcggccgcattatctacagcttcactgactgtatacgctgcagacccgctttgagacttatcgctatcttcttttggaacactgacgccttcaacgctgacatttacagcaacaactgttaaaccggtcattgcttcaacttcactcttaaccttttcctggatttcccaagcaacatccggtatcttagcgccgtattcaacaataatagacaaatcgagcgttacgtccttatcgttcacattaacctttacgccctttgacatattctttttgccgagcagctcggctattccgccggaaatcgagcttaccattcctgatacgcctttaacactgcttgccgcaagcgacgccacaatagaaacaacatcgtttgaaatattgacatctccggtctttggaacagcttgctcctgaggcgcattgttgtcttctgccataatataaaacctcctaattcaattttcaaaacactacgtttgattataacataacaattttaagattacaatgattattttaggcgattttattaatttttatcatacttttattgttcagaactaatttttatttgcgaagctgcaactccggtctcagcaattataatatcttttatctgagccacagaagcgctgtctaagtttccgcctttaaccacaactgaaactccgctgtcgctgacttgcgcaaaacaatcttcaaacccttttgactttactccggtctctattgcattttcattttcggaatattttgtcaatttaactatattgctttctgcttccttttttgctgattctgttgcgtctttatttgatgaaatctctttccatttatccattgtgtcgcctctcagtttatctctgtcctgacgggattgtgttatcacattggcactttgactttgattattttgattatcctgattttgctgttcattattatcgctgttattttgtttttcatcgttattatctttattttcatcatttttattatttgaccaaaatgtctccgcatcgtcgggcgcggcagtgctggaaacactgacggcgtctgattttacagcgcttatagtccagcggtaataaccagccgccagcacaagcgcaattaatccaacaaccaatacctgtttgcctctaaattttgccttcttttttgagttcataagcgtactctccttatttataaattttctttaatttttttcgtttttatatattaataagtaattttaattctattggccgccaagccgtaaagagctttcacagcctcatagatttcatttcttacattatcgtttttagcgccctccgcgacaacaacgacaccaataggataaggaagcttttcctgaacaacatatggagaagcgtttcctccaaggcttcctcccgacgacataatcggtccgttttctgatgagctggactctttctttccatccttatcttcgcttgtctcactttgttttttgctgtctgcggcaagaattttttcattggtgctgtcaatgtaaattctgacgctgacgttgcctgcaccgctgattttctcaagtatcccctttaaatcttcctccattttatttacatattcctgctccgttttatatccggcttcagtctgatactgattataactattctttgcttccgaagtttttgaaacgtcttttgagccaaaacttcttatgcagaataacactatgatagctattataattatccatataacaatcatgtttatatgtttcttttcgccgggagagtcgttttctttaaaattttgataaagatcgctgctgtgacttttaagttttgaaaaaatagtttttagattcatcactgcacatccttagtacctttttatcgggataaaacccgtgtattactctctggttaccatcacgccgctctccggaataccggttatagctgatactattgtttttatctcgtctgccctctcggtatcatctccgctcaaaactacatccactttttcaatagtcccatattcgcttccgtcgtcagctgccgaaacactgacttttatattatctttaagctcagggatttttgtttcaattctggttttaatattattttcaagagtttttttgtatattgtaatcacatcctctttttgtttcttttcaatactttcaggacttatttcagaactcatcaaagtacgggttccttcggcatccaaaaaactttctatatcaaagccgtttcccagcaatgatataacagggcttgatatagttataatcagcaaaagccccagcaccaaatgaacatattttctatactcatcgcttggcataaccgcttccgccaaagttccaaacactactacagccgaaactgaaaatgcccaatttctgattaagtccacaacaaagcacctctacgttgaaatatttatcattacagtaataattattatgaacatcactgacaccgacaccagcattgagaacaccattgatatcccattagccatacatgaaatacactcaacaagcgacttatgagctatcggctcacaaaatgccgctaccagcctgaaagtcaacattgcggctataatatttactataggcatcacagcaataaaaaacaccaatattacaccaacaacaccaacggaattttttataaccgaactgcagttcatcactgtttcaacagactcagagagtatccccccaacaacaggaatcaaatttgacgaagcaaattttgtaagctttaacgtcagtgcgtcagctccggaagaagctatactttgaagccctgcaaacgccacaaaaactgtcagtaaaacgctgagtccatatttaaccgtattatttatcaaagagaccagcctggtcgttttcaaattagctgacagggcgtttattgtcccaagtcctgtgccaaccataacgagcggcataaatatagattttattaaagtcagcgcagcttcaattactgtgagaagcacaggttccagtgaggtagcggaaacgattgccccgcttgacagcaaagccgtaatcattatcggcactatgcacctcataaacaatgtcagattttctattgctgccgaagctccctcaagacagctgtagaaggttgatgaagccaaacctgctacggctataaaacaaacataatatgctattttaccggtcgcgtttttttcaaacccggtcacaacagctgataaaaccgagcttagtataaccatagcgactacaagcagcatatttttcgtcactcccagcatttccccaaataatgctgataacaactcctttactatcccgatcggatttagcggaacttcgcctgaggctaccctttttataaactccccgatattcattccgttagcatatggcgtaatcgactggtttattatttcaccggcgccgccttcaatttgttctccatacagttctgaatatccactgattaattctccgcttaaatcctctccgtcctgctcctcccccataaccgcagacgaaccaaaaaaaattataaccgcggcaattataatgcagcatatagtataatgtttcaaggtacacctccggtaagctatcatttgtgcataattatttctttaactaaattcaaaagactgtttatgattggaatcgccatagcaagtattataagcttccctccaagctcaatttttgccgctatggcgttttcacctgcatccttgcataactctgctgtaatacacacaagataggatattcctataacttttataacaatcctcatatatgaactgtttataccggcgcttgacgccattctgctcagttcttccgtgattcttataagatacggcatagcgcaagccaaaactgtaaacgataccacaacaggtatgagcatcgaaaactccggttttgaatttctcaaaagtatcgaaagaattgctcctatcagtcctataccaactattcgcatgacttccattttttatatccattccttatgttaaagtccgaatatatccttaattgtggtaaagagattgcttatctcctgtatcaccatcaacagaaccacaatcaatccggctattgttgtcatcatcgcctggtcgtcacggccggctctgcacaaaagcatattaagaaccgccaccagaatacctattgccgccactttaaaaatcaaatcaacacctgtcattccatacctccgaagttataaaagaagaactgtgattaatattccacttgcaaaacctaaacttttaaacagctttgaattttttgctttttttctcattgcctcttcctcagccagcttcaatctctgacatacagctttgatattgtctgattccattctgcgagtcccgctccctaaacagactgaaaactcttttattacatcaatagtttctctattcagacaaagacgctttttattattatcaaccgctctcatccaaatctcgtcaaccctttctccgggagcaccagtcataccatcagataactccaaaaaaatatctgaaaccactccattctcaacttcagaaaccctacgggacgcttcactgagcaccgagctgtttatagaaatttctgtctcaagatattttagagcatttataaattctctaatctgtactactccggcttcatattcagaagccacaacaagtccgatatacccacaccctgcgattatcgcaaacgaacataataatttcattgtcatttcagctgtcttacctccgtttctactctccggcttccagaattgctcatgctcaatataaccaaattctcaaagacatgattttgaaatagcggcaaaaatgccggtttctctttaacctcctcaaatgtacttccatgaacactggctataatagcacagccgctccccttcgcataacatacagcgtttacctccctgtctgttacaagctcgtcagtaataatgacttgaggcgacattgttctaagcaatatattaatcccatcagatttcggagcgttttcaatcacatcagtatttactcctatatcattgcatggcacgccctgaaacattgcagaaatttcaccgcggtcgtctgctacgccaacctttattccaaaacccgaaagctgtcttgccatatctctaagaacagttgtcttgccaactcccggcggcgaaactataagagtgcttttaatacttgttccgctaagaatataaggcattatatcatccgcgcttccttttatttcacgggcgattcttatattaacagaacttatatcacgaaaattttcaattctgccatcactgtcacatattgccctgcctacaaaccccaccctgtgaccgccgcggagagttacaaacccctgccttatctcatccaaatatgcgtaaacagaattttcacatatcgaacggaacaaagtattcaggctgaatctctcaacaataaaccccttatccactccagcagttagagcgccatcaggcttcacaaaatatattttgttacctgaaacaaaagacagcggtctgtctgttcggatgcggatttcatccacattaaatccagcatttttaagaccttgatgcaccacggttctaagtccgtttttaggcatatagtccaatattgtatcatactcaatcattgtatcaccggctcttagcttgtttgtttcttatttgtagtattctatgaggctttgtcctgaattagaacttataactaaattgatatgctttgatattaaggaaattaaagacatcttaatttaacaatgaaagtttaatttccaaataaaatatttaattaccggtttttttcttaattaaaatatattataagatatacaaaaaatatctaaagatatagaaaataaaaaagcccggacaaatgtccggggtctgaatccgcctaacggcggttttttgctttgataattacaatattctcaaaccttgaccaacaattgatataggattattgagttttattactctataaatttacactactctcaaaccggagcgaacagaacatggcgctggtctggttttactactctataaatttacactactctcaaacgcaagtatattactgcgccttaatgtgtacgttttactaccctataaatttacactactctcaaacgacggttatttggattattccaacgactgggttttactaccctataaatttacactactctcaaacgcaatgttatatgaggacttaccgtctattgttttactaccctataaatttacactactctcaaaccactccttaaaatggtaagtcgttgggtatgttttactaccctataaatttacactactctcaaacggaactaaaattatatgtataattttataagttttactaccctataaatttacactactctcaaacgagtgccagctttataatgccatcaagtttgttttactaccctataaatttacactactctcaaacgtgggtaggtggtatggtggatactaatgagttttactaccctataaatttacactactctcaaacctcaaatgtcaaattttcagttggaagcggagacactactcaccgccggaaatttatagagagcaaaattatctatttatattatatattataattaatatttttcaattatatttcacataaatcattgtctattacaagctttttttcatgttttaataatgcgcggtctgtactctcaattaaaagcagtttaagcttatgatgaattgcggttttataaagagcctcaagttcggcttcggggatataactttttaaattcacaaaaacaaatattttttcgccttcaaattcagtgactgccagcatatgctcaataattttttcggaaatgcttaaacattcttcgttgaattttaaaccgaaaagtttgaaaaggttagagatatcaatatcatcttcaattgttaaatcataatcaaatgaatcgtataaattaaaaatatattgttttatcttagctatcatttcttgagtgttataatagtgctcctcatcaacggcaatgttttttaaagcagaataaaacttagacgttagcgttctttcattaatatcgaatggtactatttgtgttaataatttcatgtgtttatatatttcaatgggagtattatcatttgataatacaactcttccggggagccggagcgtttgattataaatatctgatataatctcagcaaaaaagggcgggttttctatcacaagtatatttataatattttcgttaaaaacgatttcttctgttatatgagggtgcacgagcatcataatatcaccagcctttcatcgctgtctataacatcggaagtgaacttacctgtaataaattccatccttgaaaattgcttctccgtgacgttcataacttgaactaaccccttgggcggtctgtttttcttgattaattgcgtgacagagtttacaatggtttgatttaaagccatcctgcaataaacggattcctgcagcatgacaaagccgttttttattaaaaattttctaaagcgcctgtaatcccgcctgttttcagaagtttcgacggggaggtcaaaaaatacgaatattctcataaatctataactcatatctataaaattgtattaacgatgtgtcgttgtcgttaagtgcgtcaaatatacttttgcagtatatttttattgcgttcaaaaaagtatacttgctgccgtctatgtatatagtttcatttaaaatattaactaccttatgtttttcatcggagttaaacattgtaaagttttcgtgataaacaagtctgtccatcaaaattctcagcggctccataatatcacagcttaaattaaattgattaaacatattatcatgaaataatccaagctgtgttagatatccattagaaacgacttcacgattcacagcggatagaattatgctatagccatagtttaatgctgcatttatagcgttatccgcgtttcgattaaaattcattccgaataatgcgttaaaataaaccttggcggcatgtccctcacgattggttgcgtcattaaattttatttctttgatgtagccgtttagcatttctgctgcgttggattgattaacttcacgtaacagaagagactgattgcgtattttttctgaaactatttcagtccaaacgctagctttaatatcagaagtccacccaatttgtttttttatttttaatgagcaatcatgactgccataaagtgaaacgagttccgaggcgggattacgcttttcatcgcagagaattactttaatttttcgttcatttagctcggctaaaagacagcctgttatagaaacggcaatattctcaatgatgaccattgatatttcatcaagataaattcgtttagtttcctcggagcggacaaccatatatcccatttttaaatccagcttgcatcttttggatattactactatgcgccagctcataggtcaagtagattaggggactttttctcaaaaagccccgttggcgattggtcaatgatttttatagaggaaaagctcttcttgtttaaatccatggatatgctaagtatagcagagctttgtgaaccgccaattagctttaagtcaattccacttggcagggtgcagttaaaaagtccaagcattttaaaaagtgcaatgctttgttcttcaacactaaggttggtaaaaaactccttgccctgttcgataatttcactgggagttttaaatacattatacttggtattttttaatttgtccaacagaatattatatagttctatgtttttctcattggttatttcatcttttacagtgatttcaagggtctttttattaagcctttgatattcagaatttctattgttatatgtttcaaggcgttttatgtatttttcccattcgtatgggagaattaattgaaggcccctctttattttaattctatcgttggttttacatgtcaaatgcgaacggaagccatctatttcaagcaacgtattatatttgatttttctgccgccaagcagcagttcaggctcaattaaaccgtgtttttcacatagatgatttaaaacttcttgctttgatgttaattgacctgcatatattaaatctataggcacaaaggatatggtaactttatcttttttcatatgcttaaccaaatagaaataagttgatgtggcgctgttatatcctccatattttgatatatccgatatattatctttctttaagctgatctgaccaagtccctttttaagcggcattatattaaacagctcacctttttgacagctggaatatcggacaaatctgatattatttttttccattgtatttttaacggtggttaaactggagccgtctttaagccatgcggtatcattgccgcgaataatgtcatgctttaaaagtgaatctaatttaagtgaatatttttgtccgcttttaataaagtttaaaggattatttgtgtatttaacgtattgaacattacccataactatattcaaatatgcgtctttcgcgtgatgcaaatcattgacagacctgcatttaagcatatcatatgtttgcctgaactcggatacaagccgggctttgacataaacaatttgcgtgtcggggaacatttcctcaagtaaatgagcgatagctttagtggattgctgcgtttcaacaatttggcgattgataaatccggccagctcttcatcagtgaattcggtgtccctttcaagccggtgaagcttttctttacttatcaaattgccttttgcaagtttctcccacatgggtttcatcttattccttatctcgcttgaaatcgggtatttatcgcctttgtttttgttttcttttgaaagcacaagaactttattatcaagtgaatcatctttttttcttgaccttggataaatgtggtccacatcatataccgtacttgcaaggttgctgatattaatggattcacccgaatacatgcattttccaagctgagtaaaatagagaaacagccgttcgctgcgcaactcgccgtcagctttcgaggataattgtttttttaattctccaacttcatcttcaccataatttttgtacatttcaagtataaggtcgcgtctggattttgtgcgctttttttcaccttctccgcgcgccatttcaataaatattctctttggaggcgtgggcataatatgcttcaattctttaacaatgtcaagggttcttagaatagggcgcttaacggcgttggatatgtacatttcatttagccggtctataacgtttttaggatgagcattataatattccttggcttgcttctttacatttgatgaatatccataattttgggacagcagctccataaggtttttattagtctcccaaagcatggtgattatatttggattaacaacttcgccggttttggggtcaatgtcaaaaacctctgttaaaaactcccttgagagccggccgaaatctttataattcgatttcgcaatctttttaatagcctcatcggaaagcgtatagttttccttaagccattttttaatccttaatttatcgtttgaaaatgttatcttttcaattattctttctgcgtcttcttctgtcagcatgcctgattcaagcaacggtttaaaatctctgagcggctttaaggaggatttaaccgttatatcaatgcccgtaatagagtctttgtcttcataacagccgtgggaacgcaaggtatctttaatatgttttaatgtgactctgtcgtgttttaagaatacttcattatatattaatttcttacattcaacagtgatgggtttgttgttgatttttatattattgatttcatttaaaacattaaatctgcagtatagaagtgaatttttgggcagaacatttttgcccggaagatatgtgcacttgcacgtcattcttctgataaattcctcttcgcttgcgtcttcatctaccatatctttaaaattccacggatatatttttccctctgcttttcgtttcatccatgcaaagttacttttatctgatgaaactagtggtccgacataatagggtattctaaactccataaggcttaaaattttgtctttaacagagccgtattcatcagaatcatttagaaaattaagatatgttgatgcgttattaagtattaaattaagctcgtaccaataaagctgataaggaataacgcggttatctgaattgacctgtttagggcaaaagctcaacaaatcaagacggttcagcatatcatcaaatttagagaggtcagccttatcgcattttgtttctttgaatatgccttttatgtatttacaaaaatcttcaggcgatgcttttttaaggtcggatggtatagttttgttttttgatttatagtcgttggtgttatacgaatatgcaagataattaggaagtttgctgtcagcaatgcggaacacatcgtcatacttttcgggaatatattttttaacggcgtactttaaaaaggctaaatctgatttatgctgttcataaatttcttttttagcttctgaaatacaactcttttctttaagaatcctgcttagcaatgaccagtcatatattgctttcattgaagctaaaaggtcggaatctccgtcatcgagcgcggggataagcgactcaaataagtcgtcgaagttatcgtcattaaaggttatagaatttgtttctaattccttataactttcgtttagaaataaatctgacaattttgccttgccgccaacaattaacttaatggcggttgccggattaatagcagactcttcggtaagcgttggctttttgccgtcccaaagcaagagcttaaaatcccgttcctttgccgttttggttatgttacgctttaatatttcagcaaacttttctgatgagcattcccatggctgcgctttgtctgcgctattaaaccagtttgtaaatacttgataaactttgtcgaagttcagcacttctgaaatattgtctttatcaacgctgaacagaaaatgacccctatgcgccagtatatatgcgcaggcaaggtaaacaagccgcacatcatgaggtgaggtatccttcataagctcatcaatcaaatggtggattgtaggatattcagaaaaatattctttatctgtgtaatttacatcattaaaatagatattttgtgtgccggttgacctatcctccgggtataatgcgctttgttttaagcgtataaaaaaatccggatcgatttccgctatgggctttgccattaattcctgcaaaagagatatgcgctgctgccgtctgtcaaggcgcctgcggcttgttctaaagcttcgcctgtcctcgcattggttggccgggtcaaaaagatgaacgccccacatggcgttgcttttatattttaaaatattatagccggtatctgtaacagcccagcccacagagtttgttcctatgtcaagccccaaaagccaatcgccataaaaatttttcttttgcatattgacaactcccttatcttgtggtagtatttgcttataggatttactaccctataaatttacactacgagttcaaataaaaattatttcaaatcgttctttatgttcgcacaagagttgtgcattttatttgtaacttttgcctgcttttttaagcaggctttttattttatagtataattttactataacttacgaaatttgtcaatatatataataaataagataaaaatattttaaataagcgatttttaaaagaaagaaccttctaaagtagaaaataaaagcggctaagcaaaagcttaaccgctcagactaaagacaaacgccattgcagaatattccgaaatggcgtttgtcttcagtgtaaaacccgcctttttgaggcaggtctgtcagtggtctgaacccggacaaatgtcagggttattagattaatatgttaaattctaaaataatcaaacaatgaaccaaaatctattccgcctattacagagtttttatatctctcatataacgaacggttgccgtctacaagaattcgggtagatattccgtacaaatgagaaatgtacgtttcaacgcaagccgccaaatggtcacacgcccttattatctctccgtcaattgcataaaaaccgtcacgattgtagttttttgaaatttcattgctggttactgtttttatctctccattaacaactactttgcttgaaaactcgttactggtgtaataggatatttggctgcgccactcatcaggaataagcggaaaaagaacactttccatctgttcatcctcaatttcctttatcagctcatcaagcccgataacagaatttttaaccggtgaaactatatcacgagtcaaaacctcgggtatgtcatgaaacaaaccgcccaaaaaattatttacgcatctttcgtccgacgcgccaatctcacatgaacacaagtaagacagcactgctacgaccagcatatgtgagataactgaagttgccggtattctaggagaccgcgaccatctctgctgaaacctaagctgacctataagcgctgtgaaactctttaaattattgtcgctctgatatgttttaaaatattctaagtcggaaaacgagtctatcttgctgtctatttcccttctggtatcatctataccataataactgcggcacatatcatatatgatatcaaattcccacttagtcgccaaataatgagccgcattcaaaatgcccttttcgttttcagaatactttgggtcaatcaaatatttttcaaacttctccaaaaagttctgcggtatatgttccacatcacattttatttgttcaacagaccaatgattgagctcgtctccctttctgtccattaatttatgatataccggaggttttatatcggtcagcaaaagccggtgaaggaactcaaatattcctccctcaatcagctttctccaatcagtatttttattaattttacctaaggtataagcataaaccattttatgagcctgcttatcaagctcagtaaaaccgcgggaaggtcttatatggtcgttccagcgctctattgaagccgcatcaaaaattgtttcaataagtgattttcttatcattctatatacaactccatttataatttaatacatgacttatattatttcgtctcaatatccgctataacagccatcatcgcttttgcaacagcagggtcaaactgtttgccgctgcatttgctgagttcgcttataatgtactctctcgggtaggcctcacgtccgggacgctcgcttgacattgcctcatatgcgtcggcaaccgcgattattctggagcccaacggtatgtcttcacccactaaaccgtcagggtatccgctgccgtcaaacctttcatgatgatgcttgatatcctcagcataatcgcttatctcagaaatactttttacaattgacgcgcccgtctttggatgattatgccataattccttttcggcctcagtcatactgagctttgacttgttaagcagttctcctgccatataaatctttcctatatcatgaagcagggcagcataatataatccatccaaatctttataacccattttaacgcctatagcctttgaaatatcggcaacccgttttgaatggccttcagaatagggcattttcttttcaaaggtgtcaatcattgcatataagacatcgtctgtaaaccctttaaagtcaactatctttccattttcatatttttcatgaggtgaattacctgcgccggaaacagaagaccggtcattctgtccaccgctttgttctgagccgcatttttgactttgtgtcacctctcccaaatcaatcgaattcttcttattctttaaattcagcttcgagataacaacctttgtccctattgtagccgccgtaaatgccactgcactggttgctgccatcaaagccacaatctttcccatactcataattacacctccattattttagttgttttattattataacatatataaattgatttttctacatatatttttatatttaataattaattcacaaatcatactagatataaataaaaccgcatcgcaatctgtataaattgcggtgcggcaaataaaacattatactatttcataactcgtatcagattttacaataatctcagaactataaaactctttaaacgatttatatatacatcctgtatcgttaactcctgccgtttcgtatgctgagtgcatagcaagctgagccgctccaacgtccactgtgttaatggaaacatgctctcccgaaagattacccagcgtagaacctcctaatatatcacttctgttcacatactcctgatattctgcaccgcctttttcacatattctcttaaaaatgccttccgaaacagcgtcggttgtatacttctgttgtgcgttatacttgataagaacgccgccgttcatataaggacggttagtcgggcaggccatttccggataattcggatgcacagcatgtccattatctgccgaaaccataaaactggacgctagaattttttgcagcttagaataatttgagaaacccaaatcctcagcaattctcataactgtgtcatataaaaatgtggatttagccccctgtttggtaccgcttccaacctcttcattatcaaaaacacaaagcatttgaaccgctccggtaggttctgaattgagcagcgcctttaaagacaaataagcagattccagattatcaatcctaggacacgaaaaatattcggaatctcttccccaaatagaacccttcatcctattatataaaaacaaatctgttcctaaaatatcttcaactgttacttcggcctcagcagcaatcaggtcaagaattgacttatgcccattatggctatcaccaaacagcggaagcatatctttctgcggattaaacttatacccgtcattgacatctctgttcatatggattgcaagactgggtattgaaagcaaatccctgtctatattaacacattttgtttccactccgctgtctgattttacaacaattcttccagctacagaaagaggcttgtcaagccagcttgtataaatcattccgccgtacttttcaacatttaattttatataattattttcaataactatttccggatttggttttattttaaaagtcggagaatcactatgacttgcaataatcataaatgaacctggaatattttcaggcagtttaaaccctattacagaagaattgtttctaacaacaaaacacttttcaccgggctttaagtcccatgcttcggattcatacaatcttctgtaacccttagacaacaatatatctgaaatgttctctaccgcttgaaaacaaacaggactcttttctatgaaattcataatttcattagttaatataatattttcagtattactcataatcatcctccattactttcttattcgtgacctttaattgccgcctcttttttcaatctttgtatttccaaattgtattcatccagctcgggatgatattttccgtctatataaacatcaccgttactccgtctagctataaccggaagtataagaccaagtcccaaaagtatcagcggcgtcagcaaattcaaaacaagtttaaatatgccctccgcagttccataatccactgtaaccatctgtgaaacgcaggcataagcagttatagcaaagcaccatattccgagcagcataccaaatcctctattctttgtgagagtatattcagcattggcaaactctccggatttctttaacataatataagccaagaatacccacaaatatctaagcggcatacagattgagttaagttctataatatattttatcatagaatccacgcttccaattccaagcgcaggtattataatcagtatagaaacaataattgcaactaatataacgccgtttatatacacacctttcttgtttttcttaaaaagccagccaggtacgaattctttatctgtgctgccgagcaaaaccctgagcggagcgtctatagacacaatgattactgtcatattgagaagtgtttcaagtattgcatagatataggtaaacaagtttccaacgccataataatttccaacgtttctgaaagcctcataagcgccgtttgcaagaaattccttttgaatacccgtaggaaacatcattgccaaagctatagtacccagcaaagcgcaaaaagctaccatgatggttaaagtaatcattacctttgggaatcctttagacggcttctctaaatgattaacataaggcgccatcttttcacatccgcccacagccaaaataagaatagacaaatttaaaagtgaatttatatttatgccggacagccaggtatcagaagatccccagttgatagcggcaaacgatacatccttatttatagcaggagccgcaaacatcatcagtataaataaaatagacataaagaaagagcagaatccaactaccgaggatagatgttttaagaaattaagaccgcgaagcgtcagaaatatagctataataaacattatcaaagcaactccctgaacaattataggagccagcccatttacaaaattaccgtttccggaaaaaagccaccccaaggcaacaagaattctagtaggtttctgagccagatacggggtatgtactacccaataagtccatccggcataaaacgctattcttctgcccatagtctggtttacccaagaacttacgccgccgcttgattttttgaaaacggcacccatttcaccaaccataagagcatacggcaggaaatacagaaccagcacaacaatccatgggataatagcccccataccattgtaataaaaaaagccctgagttatattattaaatccccaaagaggtacaaacgacataagggcaagggtcaaccaatgcatttttttaatagagttatctttcataatacgccttcttccacatagtttactcttattgttccactttttcacaattttataagagccaaatttcgacgtatacaatgaaaatttttgtttatggcaaagactgattttaatttattattaaattctgcaccgtctataactcacaactttagcatagttaacaaatatcacaatctattgaaatattatatcaattcaattagctaaggtcaagaataaaatacaaatttatttaaaaataactcttgacatatttcggtaaccatgatatactaaaaaagttgttgatataaatttcgaggtgtggctcagtttggtagagtactacgttcgggacgtaggggccgcaggttcaaatcctgtcacctcgaccatttattaaaagctgtcgattaaaatcgacagctttttattctttacaaaataataaccttttaaaattactgcattttgtgttattcacacaataattcatatagtttaatatctttgaaaataaatcctaattttaaaaattctatttccggctcagatgtcggagccaaaggaacagaaattgcattaatttcacctttggctcgacttagagggataattacatctgcgccgtcccaaatatatagtttaaagatgttttctataagattaaatattacaaataaaaaatttattgtttcctattatgtattaaagaaataacttgttatatcttataacactttttgaatacaaatttataattatatctctgtacactactatattctaaatcacattttgtaaatttaacagagccagttaaaacaatttttatagtaccagtttatttattctaaaaatttaaataatcaattaacaaatatttatttatatagaaattatatttagaaattttttgttctctcttttcatacaaaagtcttttgtctatattaaaattacatcatactatggcacaaagccatatacagataaaatatatcctctaagttaatatttttgaacattgataataataatctaaatttttaccactaactccatttatttttaaatagttaaatttatacccgaaataaaaatttcaaaaaccacacatagtttttatatcactttatgtggttcttaattataacataatttaatccgtcaaatattatcagaaataaatataactattttctgtatctgtaaaatcaatctaaccgactctatacttatagtaatatattgcaaacctaaactttatacacatctacaccaaatataaaaccagattcttgtacttggttaattatagatattatatttctactaactcagaatctgttacaggaacaatatcatccatctcttcaaatacaaatactttaaaaaaatctatattagtatttgatgtagattgagtattaatatttgaatctgtactttttactatctgtattgaaattaacacacctttattatcataagccgctacaaccactgaggaaccgggttcaatatttgtgagtttggtactaagccaatattctccgttttccagcttaatttctgtatcagtataagaaaaattcggcagcggtgtcggtttatcggtatgtatcggtgatgggcttggggattcaatataatcatgcttatgcggctgtttttctttgacctcctcgtctgacgcgtctttaaatgaaaaaactgcaaaatcttcctgattattgccggtatcagaacctatcctgattaaagacttctgctttgataaaccatatgaaggcacagtctcataagcgtcaattgacgaatctccattcttctccaccacaccaagcaaatctataacagcagctgttgttgctttggcgttaatatcctcagaattttttgtaagcgtcaatttgaacatcttgttatctataaccatatcatcaaaataaatatcagcgtcaatctttatcctggcatttatggagtttagcttacctccaatcaaataaaaatgcttcggttttataacagagttttcaggcataacaaatttttgccatccatctccaactgtcgatgaatactgcaaagcataccctgaaatatctaccggaacatctagaggattatacagctgtacgcagcttctatccataattgcatcagttttgcccccatctccgaaaacttgataaatcactatcgaatctgaaatcaattttgccgtttcggtcttttcaaaaatggtctcaacagtctcatcaaccgacatatctaagttaacgcagctgtcatataccttttgtccatttattaaaaaataactaaatttatatccattctctgccactgcattgatttctatcgggatattcttataatattgtgcggaatagtttcccggatttttaatctgccatttgttatcagaactaagttcaatattatttacctttatatatccttttgataaatccgagataaataacgcgttcaccatttcatgtacgccccaagtttcttttatctcatttcttgcggcggtttcccttaaattgatttgagattttatactgctgcggttgtcatttttcatgctaagcgggtatctgcttttttgctcggcaaccaaatgtgaaatattattatacatttcatccaatcttgaagataatatatccttatcaaaaatagtgttcatatagtcattataacgcctaattgtctcatttctaaaatcatcgttttccaaaaatgccgcaaacagctgactaagcttccaccccttagctgaagctgacggttggtctttgccatatattcggttttcaaggatattatcagtatttagctttccgtttgcttcaagagtgtagtcgttatccagcatagcaaaccgccagcggtcgtcaaaatcattttgtggattggtatttttccaaattaccacattgttctgaggccaatcccaatttttaaaatacacatttgcaatcacatagtcaatcatatttgacggatcaaagtatttacaagcagtctcataattatccggaaccttaagactgttttccaaaatccaattataatgctcaaggtactcattaagatattgttcttctccctcttctagcgtgagaatatcacgaacaccatcttcagatgacatttttagcatagcaacatctttattgtcattcagcttatagtgatatctaaaatattggtcatcataccgctcacgcaaatcatacataccccaaaattcaccgttaataaatgcaacagacggacgataaccctgtgtatcaaaatcaagaggagcacatatatcctggataaacgcatcctggataaatttcttatcccaatcatttccgccgtttcttagcataagacgcttatactttgttattataccacccttaaaatcagtaacagttccatcaaataaatcgccttcaaaagttttcagaccgccgctctgatattccggattctcacgggcataaacacgaaacgatttttgctgataatttcttgacgcgccgccatgaatacggatacccgccggctgggctatttgacaacttccgtcagaatcaaacacttcaacaaaagcgctccgctcataaagttctcctgattctaaataattgggcgacatatatattccattttgctttgaaaacaaattatcacgttcagtagtaatagaaataacttttacgccatatctagtcaaaatatcgtcactaacaaaataagagtttacgaatataggagttttagattcaacgtttacagctctggcctttataaccgttcctttaaaaactagaccgtttggcgctttaaagctggttgaaacaccggaaatttcagataaatcattgggctgtgaagtacggttctctatagtgatatttccattgtaaagaactgaattttcggttgggtcgcttccgtcagtcgtataataaatttgtgcattttcaaggtcggtagaaagtgttaaagaaaaaggtttctgatacaaaccgccgtttacagaaaaaaacactgaataattttgattaataataccctcagcaaatacaacagaagccgaacataccaaaatcaccgtcacgaataaaagcattgttagtttgcatatttttttattcatactctcaccccaatagtatatatttactaaaattataccatgaataaatatgaaatgcaatggatatgcaataaaatctgttaaaaactccgacaactatatactgacgtcaaattgctcatgttgactctttaaagattactgttttttattttaataatctaattcatttctcaaatatcaaataaaaataatatataaaaactaaatatatttaataaagactttcctcattaaaataaccttatcaattatctcattcattaattcagaataattttcgtggttatcaaaatttaatccatatattaagtatttaattcttgaagcttttctattattcaacctttgccaatctaaagataatccaagctcactttcaatctcagttttattaccatataatttatcaaatagttctttattgttattaatatataattctatgacaatgctggattctttattgacaagattaatacatatatgtgcttcacttgttccaattgcaacattataccaattatctgtcgacacttttctgatattaaaaggtttgcccctgttaactacaagctcattaaacattgtccaaaatattactctctcggactgagttttactcatatcatttgaatcactgtttccttttgaattcttaataaaatcatttggcttttcaataatttcgaattttggagctggtatcgaatcgccaattttatatgcatgaagttcaattaaaaagaaatttaattttttattggtattattattcaaccactctattgcacttctatgttcctcacgcgcttcttcaactatccatacaatcacttgagcatcaagacctgacgcatatgttattatcttacctaaatgatcatggtttgaacattcaagttgattttctattattatatttatacctgttgcttcatctctggcaactaaatcacatctatatgccccaacatatacttctttattaatatctattaaagtcaaccctagaatatcatttaaaagttctatattttcttcttcagataaccaattagaaaaatcatactgttcgtgatgccataaatccctgacattaacttcttttaatctgcctaatttcataattaaaatcccttcttatttttaatataagtaacatcatattaataaccatcttcacataaatttcagctcctgcatatgtttaattcatagtatccatagattctactacaaaatttttgctgttaaaataataaaacacaaattaacttttatgattagttttacatcactattataaataatatatcaaaaaaactcaagatgctttatatatttattaaaatattaataatattcaatatcacttttgtttaatttaaatacatttaattaactaaattttaagtccattttaccagtaattttaaatacaaaataccgtcagcattttaatactgacggtaataaataattcattctttctttaatgttactaaacatttctaatgtttttttatatttataccaaccaaaaatcccaccagcatacctatactaataaaatatgtgatattagttaagaagcttgctccaattccggcgcccaaacataagcctattgttaatccctcattcatataattttcaattttgccattcttcttatgctctttaataataactaaaattacaattacagaagatatagctgcaacaattacaggcagtagaactttaaaatattccatccccacacttcctctctaaaaagcaataattttgaattaaattttgttttttgctgctctgcaagactataattatttttgaatatacattgtttttgaaatgatattatatctaatttatatatagttatatcactgctataataatttctaaatattaccgcctccaaaacaattactctattttataaaacaattagtattttgagttgaagtagcatttttctagaaattatcactgttatgttaaacaaataaatttatactgctacccaaaaatcagcataaagaacgctgtttccgataatatatagtaatggcacagaaaatcggaaaatatcatagcttcactcgggaatctacaaggatactataataattatcttctattttcttatcccgcaacttctaaatttgtaaataattctttaaatagtctttataattattaaagtattttatttttaacaaataaaacttatttttatattctttttcattgttttataaatagaaccatgatgtacaagttcttttataatacaaaacaaaactaggccagctgcacttttgctcgtatttttacttaaatttacagttaaaacggcttcctctacttaaacttattttaatttgcctaaatttttcaatataagttttatatttaaatattatctatatataaaattcaattctattaacatatatctatacgaccattaaaatctttaaaatatttcatataatccactaacttatcattattataattctgtttatactttttaaatcctctttttattaatgttaatttttatagaataaaaacagatatgggtaataattcgattattaaaattcaacactctcatatctattgagtcaataatagatttattaccaattattatccaccaattaaaatatataataaataacaaagttctaataactgaacaataaaatataaatacataaaaatagaaattatatattcacttatttgttttaattacttcattgtttgtacaaactactaatataataattaattttacaataaaacagagcgcctgagaaattatttctcaggcagcttttttgggaagaaatctataattatttattatttctcaaacttttatttatctcaatgtaaatttttctacaattatatgaaatattgacatcgcctcaaagtatattcataaatggcagtcattctctgtaaactgcagacttctaacaatgagtataagcatattaatatattagttattaaaatgagaagcattattttctatttcattttaacaacttatgtatttatatctaaaacctcgaatcaaaacacatattaacaatttgtcaatagctgacatctcatacataaatccataaataagtatattaaatcattactacaatccatacctgcttaccctataaatcgatattgttattcaaacctatatacactttcagttgatatatatataaatctgttttttcaataaactgcgattatgctagcattatataccaaagcaatgtatcggtcagttgacagtattgctgtattaactgccaataattgacttatagattgacggaaaatatatccgcatgttataataaatatattagaagataataaaataaagggaagataatttatgtttaatttttatgaggtacatcaatatgaactcgacgttgttcatcatcaccgggcactcaaatataaaagccatctgcataacgaatttgaaacaatatttctgttcgaaggagaacagggactcattgtaaacggctccgaatatgttcttcacgagggcgattgtgctgtaattttcccaaatgttcctcactcatacacacgtccggattccataaaaaaagtcaataatgctgccgacagcgcaataatatttatgcctgctgacgcactgtatgcaatgtttcccgacacgcgcggctcatatcccgatgaatgtattatcaatgctgatacattaaatgaaaatgcggtactcgcttttcataaaatttttgaggaagcgagtataaacgcacaaataggttgggcgtatattatcttcagtcatacaattcctctccttatgaaaaacacacttctttcattacaaaattcagacactattactcgtttgctctcatatatttcattgaatttcagaaagagtttgacgcttgatatgatttccgacgagttgggaataaacaaatattatatatcaagagttttttcaaatcaaataaaggtcagtttcagaacctatctaaatgttctccgcacaaaccatgccgcctcgcttataaaaatatcggatgacaatcttgaagatatagccacagactcaggctttgaatctacacgctcattctacagaatctttaaagatatatatggtgtttctccatcccaataccgtaagatgatacgcagatattcaatatattaaataatagccggcggcagatgataatcatctgccgcttaattttttattttctgctgtctttatttactgatatccgccgcacataacggtctcatagtatctgttgaactccacagcataacctttacactgtctgcaccgactgtactgaaatttaatggtgtcacaacatgttctccgggctctgtaaatgtcactggtataaactctgtacttgtcaaaatatcattattatatgctgcgaaaatgacagagaaagtaccggcttcaggtgatattacatgcgcctgaccatcttttgtatattctatactgaatttcaaaggctcaggcgtcggacttgcagacggttcagacgtaggctctatcgttggacttgcagacgggtctgttgaagccaaaacctttacattacatgttgctgagaatccaccgtcaacagtttttgcggtaataattgtatcaccaggtgaaagagcaataacctttccggaattatctacagaagcaatgtcactctttgaactgctccatattattcttgtatctatagcatctgatggatttacggaagctacaagctgtttttctgcacttacgtttaattcagccgaagcatcactgatcgtaataccttttgcacggcttaaatatataggatcccaaccattcatcatattaagtacgctgtaatatttttgttcagcttgttcctgggtcagcaaaccatgcatattatcggttgtattttcaccgactgacgggtcgtttaaatcaaagacatacaatggcgcgtttgatactgttccccagccgccccagcctgacggccttgttactcctttgtcaactttagtgtttataagatagacttcacttgtgtctccgccccaattacgtccccacgcgattgaaccaaattttcttcctttaacatccgaatttttgactgtacagtctctaaacaaataatagccgttatttcctttcgcaccgttagcggttatatatccgcctccgttttggtcgctgtaaccggctgagaccaaatcacacttttcaaacacgcaccaaccgccgccgaaaatatagtcgacgtttccgcttattgtgcatttgttaaaatatagtctaacaggtccgcctgtaaacaatgtgtcctgatttgatataattacacaattattgaactcactcttatcagctgccgcaaaaacagcaacggctgtagtctgcacgcttcttgaatcggcagatttataaccggcgtcatttggcgtcagcattctgtcataaccgcctcctgtatcttcaacaccgtctgctcgctcttcgtcagtatattccacattaaatgaatttataaatttgatattttctgctttaaaatctgtcgcagtttcttttattttaaaagccgcaccccaatcgttttgaatatcatttttaacagattttgcaaccgcatagtccttatcatactcgcccgtaggaccaacactgtaatatctatgatatgaagcatagtaccatgtgactgttgccggattatccttgtcgcttgtcagtgtaatgtacggcgtagtaagtataacctgctccctgaaagtttctccgccctttaaataaatagtaacacgttcagcttcagaagctgggttgccatttgcctttacagcgtcaagagcgtcattaagcgttgcgtaatcacaattcgttccaacagttatatatttttttgtttccggctgaacaggatatacaactaaaacattttttattttattattatcaccaagtactgtaaaactgttttttgaaagcgtcgacagcgttccgtttttatctgatataattgtgaaagtatacactccgtttggaacggacgcaatccatttaccattcgaaacagtaatttcataatcttttgttccatcgttaagctttaatatgtcgccgtcttttaaatcaacaacatcaccaccgataatataatcctttaattctgttatagctacattctgaacctgactggttcctgacgggattattccgccaatatctgtagagtttgtttcagatactttgaaaacaccattttcatatgttccaaattttatcacataagattgtccgcttagtaactccgcagaatatgaaccgcctaaaatctcagcatactgtatatcgcctgatgaaatatcattaaacattatacatccggcgtccgttcccgttacagttccggtaactgctgttctagtaagcggtgttgttgtaacggaggatgcataaccgccgcttataacatttattactgcatagccattatcattgccgagataataataatccttagtaccgctgaaattctgtccgttcacagtataagtaaatgaagaagcatcaagcgtcaccttagtatccttaactacaggaacttttagtaccgtacccacagcgccatctccggagccgccgttaatctgcattgctccatttcttccgtatgtatgaaatttaccggtttgtgtgttgacaagcatatatacatcagcgtcagttttttcaccctgcttagctccggctacagctatatcaggctgatgctgaacactatttatataatgaagcgattcaggtttatagccgtttgaagcgttccattcgattacgttattttttatagtttcataatttgtttcaggtaaattttgagttatcagctccgatgtcaccgttacatttgcaccgttggtatcggttaccgtgatttccgatggtaccgcctctactttatatgtagccggcgcatacgactttgcttcaacggtatatgttccagctccaagtgcggctgttacaccggttgactcatatgttttaccgttttctgtattggtaaagacaacactttttgtaaaatcatttttggttatgcttacaatttgatttccctctgtgctttcttttataaccaaatttttaaaattaccggtcagtccgttgcttccggaaacccacgaggtctgtaaaaatattgctttttcaccctgcgcaggatattgagatgtcagagaaaccgtagaaaagttccagcctccgtccgcgcctgtataattatccagctgcgctatcaaaactccgtcagaagccaaatcaggagtttctgccgaacttattttattactatcaaggttccgtgtgtaaaatgcgtctgtctcctccgctgtggcgtttccatcattatttgtgtccttaaggggaagtgcatatatagatattccgccaacataagcacttgtaagcgcccagtctatcgaaacacttattttatctattaaatttgccgtacctgcataagcgacagcaccatttgaagttccatccaaataatcagatttaattgataaatacttgttttctccagtgcctttccaaacagacttaaaatttgcaaactccgctactgtacttgaatctgccagtgcaggaatataaatactgccgcaaatcataattgcagctatgcacaacgacaaaagctttttaaaatttttcacatcgatactccctttcataatatgttgttataattatatcacaaattcaatatgcaatcaattgccaaaacctgactaaaacatgtcaaaaattgaccaacaaactttaagttactgtcactcgatgattattaaaatacacggcataaaactagcacagcagttataaaaacacaatgctaagaaaatctaactttttggtgttatatcaaaatgtggttacatttttgaattgttttcattaacatttatatctttgtattctattagtaatagattcttctttatcattttccacaaaaacaatagtatggtgttctagaaacatttattacttcatttataccataatagaaaacgaaaatgtgatatctgccgtaaatattatataaccacctcattgctggataaatggctgaagcagtcagcagctagcggctcttttcacgaaaaaaataatcgttctgcagaagatcaggaatacgaaacactggaacaattgcaatatgaattatcggattatgtaaactggtttaacaatcacaggattcactcatcactgggctatatgcccctgaaagaatatcgacttactaaccttagataaattgtctaaattagtgttgactatccatttaacaacagacttacagttgtaattacgcagaagtcgcaataagtttttctgacaaccgtgaaatcaccgtacatattgatccaattagttgaaaggtattaaatgctgaacggcaagattactattgaaaattatataactgcctctatatttgataaaggttgggatggttattaccaaagaattgcaataaatggatctggtatcactttcaacaaagtggattacaataattttaatgattggcttggcagacgcaaaactatatcagagggacgtgtttcatgtgaatatttatatatagaaaataatcaattattacgtgatttactattggtggcagaagcttgtccagtagatgaatatcttagtgatcaaattgttttaacatcatatttttatgagacttttggatatctgccaaaatacaaattgtttgaaaatgattattaaattatattttgcggcaaagtttacttttttgatggaaatatgaattataaatattctacagataaatagattggagattataaaatgaaattaaaaaaatcagtaaaatttatagcaaatgtgaaataatgtctatttggatttatgtgttgatgagcatagttatttctacattgctcacatttttggtttgtgaaagatacggtatgactgattatttataatataccgtgccagtatattatatagcatttttagcatagttggaataatctttttaacaacgtttatatatttcttaatacgaatatctattagaataaatacaaaatggataatagttttcaagtatgtttctctgagattattaacgtcttagcttatccattaaacgacaaaataatagaatccctccatgtcctaactaaaacgcttgactacaatattaaatggaataaatccagtaacacagataaagatgaaaataagcatgatacttgatacacaatctattacactgatttatcaaataacatagaaaatatggattttaaacactacgtgaagctaataatacgagcgagatgatttccttgctaatgaatacaaaaaaatgtaatattacttataaaacacctgttaataaataccttcaaatatgaaaaagaggtctagaaaaatatctatatcaaacaacagtccatatctgacaccaaataacagtgtatctaggtcagataataataaaagaaataacaacttaccaccacagttcgtaaataaaaaattaagttttgtaattgcaaaatattttccaacatatttaacaaccaattatctgccgtgtttatttacgccataatatattatgatttacaaaaaaattcttgtcgtacaaccgtaagtatagaaaaaacacgcaaacaaaacaaatatattgacgcaatagcaatttgagaaatttattaaaaccgaaaataattctgcaaataagcttgttttgaacttatcttttggataggtatgtatatagtaaaatgcttaccttaactactgcaaatatactacctgataaacccatatcaataacaaaaagttttacaagatttggcggtaaggaaattatatcaaaatcaaaaaagccaaaaataatagaaataacaattctttattttctttaagatggaatacaagaatatataaatttgatatatggaataaattctaatgaacaggttttctattttacaaaacatcaccttgattcagaaatgaaacgctgctccaaattggcaagaattgaaaaattagagtacataacctttgtcatagtcattcatcaatgttgattaattatgattataatatctcatttatttttgaacggtcttggacacgataattttgaaacaactttggatacttatggacatttatatccaaacaaaataaatttgctgacgaccttcaaaaatcaaggtaaaaaaatggcccaacaagcaaaaacagctctaaaaactacgcgaacgaattagttttcagggctgtcaaattctattaccacttcgtacgttataatgttaattacattgtatcttcttattttaaaactttttcccacacaattttcgtttaaaatcttttaattagttcgtgtctgtgattgtctgttataaattattatagaagtacactagacccattatgcagcaaaattgtttaattttttataagaatctatatctgtgttgtcactaagcacaactacctgtccataataattacaattatatgcaattattgcatgggtttcccccgttttatacatatcgtttaccttttcttctttctcttaggaaaacaaattctttacataagaattcgttttcctaatcctatcattcagagctatatataaaaacctttaataatatcgttaagttcgttttttatcaaaattcctatttcagatctttcttctcacctttctacttatgatacatttttccgtctgcatatcttttaatatatacaatccatattctctgcataacttatctgaagatgcagcagaaatttaaatactaaaatatcatctgctagaacgcatacttagtttttaaatataactataaatactctacctttttggattttgaaaatttagaatttatgtggtttcaacatctctaaatagaaacataggcatatcgctcagaaaaacaatatgcctgtaatactattgttcatattttcaattaagatttatatgattatatgaataaattgtaaaatttataatcgatctattgacaaatatttacataaacattataatgttatcagcactcaaatcatctgagtgataacatatgtattaatgataggaggatggataatctttatatgagaagtgaagaattgcgtaagcaagatttattaaaactaattgacggcttggatatttcaccatcaatgtataaaaatgcaactgaaaagtataaagccgtcggcacatatttgcaagaacaaggcttgatttgcgatatatttccgcagggctcatttagtattggtactgttgtacgaccatacaacaaatccaaagatgtaaattacgatttagattttatttgttgtatagatgaagaaaagagttttacaagtcctgagcatataaaaaatgtcgtaaaagacactctatgcggatctaatgtatataaagataagctacaaaaaacagaatgggataaatgttggactttagagtattcagatattggttctgtaggattcaatatggatattgtaccagcagtttcagaatcggatgatattattctatcaatgataaatcctaatttaagcgcagatcaagcagcccttgcagttgccattactaacaaaaatggttcagattatacatgggctaccagtaatcccaaagcatacaagaactggtttcaagctataaataaaccttttttagaatatgccatattaaatcaaagaaggattctctttgaaaatgcaagcgcaaataatattatagaagaaatcccagaagacctaaaccgttcaccacttcaaagagttattcaaattttaaaacaccatagagatgtacattttagtgtgattggcaaagaaaatcttaagcctgcatcggttataattactactctttgcgctgaaatagcaaaaaaactagattctgcattaactacatttgaattgctacaagaaatagttaatgatttagaaatatattctcagcatcaaactttaacagaggatatgttttttatgaagttctcaggaaaaaaagttatcagcaaaactgatggaatgtggaaaatcattaacccagtcaatcctaatgataatctagctgactcttggatagaaacccaaaaaaaagcagaatacttttttaattgggtacaaaagcttaaaaatgactatatcaatactataaaagaaagtgataatgattttattgccgttcttgaaaataattttggaaaagattatgttaaaaagaacattgatatttctgaatatcatactagcgcccctataaacattatcaacacgccaaaaccgtggagtgaataatgatgagtgttgaatattatctacgtcatatacacgagcaatatcctcatttagaaatttgcaaagggcaaactggatatatcttgcaaggaaattttgttttgaatcatgattttaatggcatacgcatgactggaaattttaaattaatgatatttataccaaataattaccctgttgaactaccaatagttaaagaattatcaaactgcattaatcaaaactatccgcatcgttatacaaatggccaattatgtcttgcttctaatatagaattaaagttatatatctctcaaaatgcagatatttgtttgtttattgaaaattacatatttccatatttgtacacatataaatactacgaaaattatggtgtatatccatttggtgaacgttcccatggaagatatggagatttagaatatctaaaagagttgttcaatatagataatgtaataccactgctaaatataatattatttttagctacatctaagtatcgcggacactgtatgtgtccctgcggaagtaacaaaagattacgcaattgtcatggtgatatatttcaaaaaatcatcaatgcaggtttgcaaaatgaatttaaagatattttattagaaataaaaaaatgggataaaagatgaatatgcaaaacacaataaaacaattaaaaaaacttagaactgatgcaatttacggaaagaaaaaacattataatgctgcttctagaaaacgtgaacacaacagaaatatagtaattgcccaaatattaattagtgccacaacaggaacttctctgcttcatgttgtgtttggacagggaaataaagtagcagaaatcatcgctcttttattagctatcataacaacaattttagcaggatttcaaaaagcgttaaagctagaagaacaggctacaggaaatacaaaagcagcagatatgtatttaagattaataaaaaatattaatatgattttggctcttatagaggataataaactatctgaaaaaaacgcaatctcagaactacaaaaaatcactaattttatttcagatactaatgaagtggcctctcaattcacgacaaacaatcgtgattaccaaaaagctaaaataggcatacaaaatggtgaggaaacttatacagaggaagaattgaatctttgctaaattaatgctctacaatattaataataattatcatttagaaaaatagactttacgcgatttccaaaatctataaataatattatacgggcatattgcttttttggcaatatgccttttatatttccattcatattcatgatttcttcgataagaattattactgttattccctaaaaatgcgctgtattaaattatttgtatgattgactgggttttttcgtacatttcataatttactgcttttttgaattttgtgaatctgtcatagacatatttattttctaaccagacctgaactgatcgagaataggattaataacacctgccactttctaaccaaatttctttcttaatacaaataaaattttataaaaattatgattttgtcattctcactaattcatataacatattaatatattccaatatcgcgttttataaaaatccattatagttattgtacgaataccgcataaactcttagaatcagtgagttcatctcagacctcgagacacaaatattacttgtttactattaatgtcgattgttcaagtcaaaatcattgggagtaaaggccggcaactaatcacactcttaccgcaccaatacagaatttcaaaggagcaaaaaattaggacttgtctataatctcatttgcaaactttattattcctctttttccagattattatctttttatcttttcatttactatgttttcagcttttcttacccactttacacaaattattaaagttgacggcatgatttaatattgcggacagttgattattcattggacgcagatacagatacgtctgcaaatacccgccttcaatcaactaattttgtcatttacaaataattatactcatattccttttttccgaaatacgtcaatatttttaagttaatggtgtatttctttattcacataatatgttcacgaattcgatatgtcctatcttcctcttctcaaatctcttattgaaatccgcatgcagcgacatcataaaattaactgacccttcttccgcctccctcttagtgttaaaaactcgtcttgtagatttcttacagtttcccagccaatccgtatatctgtactaaatcagccatttgcctgtcttttgtcttttccgctttcaattttattcctccttaggcgttgtaaccaaccaatgcttttcaaaatagcctttcggcacttttccggcaaaaacaatgtagccggcttttttcagctccgcattaagatctcgataatcttatatgcgtatccgagtgacacgccaagcattttgaacatttccggaactgtaatataaattttgttttgcatagccatttttcacctccttgattttgttgtagcatactgactgcaccgcctattataggcctgcgctacaaaaaaatctaactcatttatcatattttttcgcaaaaaagtatagatttgttgtttgataatgctataatagtagtgtctaaactacataggagatcaaggctatgacgataggtgaaaaaatcagatatttcagaacccgtattgatatcacacagggcaaacttgccgagctttctagcatacaccctgtatcaatacacaaatatgaaacaaataaaatgacactgccacctcagattgaaaagattgccgaagcactcggaataagcccttttgcgctcactggtatagaaaaattcaacttgaaacggtaggagattttatgggactgcttatactgctttgtaaaactcatattattacaataaacgacgaacgcgtggaagatgaaactttaaagtttcgtttaagataaatcagtttatatcaaatttctttaacacaaagtctgataatcagattgtagacgctgatggtatttcatattttctgaaatcaaacgatatatttaatgatacattgaggtgagaaaagattaactacggatatgaaaaaatgcttgccaaatacggcaccagctcggaaaaagctatacaaaaagcattagttgaaatgagagtaaatattgaaatggaactgcaacgctcaagtgttgttccaaatgataagaacagaatctgattatttaagataatctaattacagcctttaacatatataaggagaaaattatgaagagaggaaatacaatattttatatagttggaataataggtatactctttattatttcaccattattactacatattccattcataaagcaaatatatacaatatacttgcaatcaattaatactattgactataaagcaagctatattgaaacatttggagcaatgacaggaactttcttagctattacaggtgttttttggacacaaagattaatagataaaaatgaagaaagaaaaaaaatcaaagaaaacgccacaatcatatattatgatattgattctgatataaaagaattgcatttatttattaaaaatatttcattgaaatttctcgctcagaacacaaactaaaaaataaaatagaagaaaatactcttgaagtatttaataagtatagaaagcgatgtgagatatacatagataacaattggattcatacagtagctaaattatctcaagctcttgataaagatactttaaaggatatatgaattatatggagatataaatactattaaaagaatatttaacgatcacagtagtaccatatctattaatgacgctaatatttctttttctctaattaataaatattttaacccagttataacactaacacacgctctaccagtgaccgcagatattaaagaaaaaacgaagattataataaataaaatagaaaatattgcagagttatgatatatatcaataaccaaaaacatttttatatgaataaataattatttgtactcaaaaggcaaaacaaatccccgaaaatcacacaaaatagcaagttacggggatttttctgtttattcccactcgatggttgcggggggttttgaagttatgtcgtaaactattctgtttacgtgactgacttcgtttacaattcttctgcttactatatccaatatatcatatgggattcttgcccactcccctgtcatgaagtctgtggttgttacccctctcaatgctattgtgtagtcatatgtacgctcatcgcccatcactcctacacttctcatgtttgtcagcactgcaaaatattggtttatttctctgtccagtcctgctctgctaatctcttctctgaatatagcatcggcgtcttttaatatctcaagcctgtccttggttatctctccgatacatcttattgcaagtccgggtcccgggaaaggctgtctccataccaaatactccggaattcccagttccattcccagctgtcttacctcgtccttaaaaagacttctgagcggctctattatttctttaaaatcaacataatcaggcaagccgcctacgttatgatggctctttataacagacgcgtcgcctgctccgctctctataacatccggatatattgttccctgaacaagataatctactgtacctatcttctttgcttcctgctcaaagacacgtataaattcctcgccgattatttttcttttagtctccgggtctgacactcctgccagcttacccaggaacctatcttcacagttaacgcgaacaaggttcatgtcaaactgattagtgaatatatcctcaacctggtcgccctcgtcttttctcagcagaccatggtctacaaatatacaagtaagctgtttgcctattgctttatagagcagaacagccgcaacgctgctgtccactccgccggacaaagcgcagagaacttttttatccccaattttgtttttggcaaactctatataattctttgcgtaatcagacatagtccagtcgccgctgagcttgcacacattatacaaaaagttttttatcatatctttgccaaacggagtgtgattaacttctggatggaattgaacgccataaaaacctttttctgcgttttcaaacgccgccattggacagtcctctgtctttgccacaactctgaaaccgtcaggaagcgaatacaccttgtcagtgtggctcattagacattggtttttatctgcaatcccgtcaaaaagaactcctgttgtgtcgagtgttatatccgttactccgtattcacgggtatcggcatggtgaacaacaccgccgagcgacatgctcatcagctgcgcgccgtagcatatacccaggataggaatacccagttcaaaaacttgagaatccacctttggcgcgtcctcatcaaaaacactgttaggtccgccggtgaaaattattcccttaggatttaaagcctttatttcatcaacagtttttgagtacggaacaacttcgcaatacacatttgcttcacgtacacgtcttgctataagctggttatactgtccgccaaagtcgataattactattgtttcattctgcatatgttttacctttctgtaagccgcaaaagggcaattatctattattttcctgaggaacatacaccggatattttccggtaaagcaagcgtcgcacatgccgcattttgttccctcggcaatctttgataaagctgaaatagacaagtatgccaaagagtcagcgcctatatgcttacaagtctcctcgacagacatcttacaggcaatcaaatatttcctgtcggctatgtctgtgccaaaataacaaggatttttaaacggcggcgatgaaattctgacatgaacctctttggctcccgcatcgcgcagaagctgaactatacgtcctgaggttgtacctcttacaatagagtcgtcaatcattataactctttttccgtcaaccgcttcgcgcattgcgtttaattttatcctcagtgcagactcacgttcttcctgagtaggcttaataaatgttcttccgatatatctgttcttgataaatccaacgccatacggtatttttgactctcttgcataacctaaagccgcgtctattcccgaatccggtacgccgattacaacatccgcgtccacagggctttcctgagctaaatacttacctgcattcagtcttgcagcgtgaacgcttccgccgtcaatcatgctgtcaggacgagcaaaatagatatactcaaatatacaggtagctgtcggctgtccgcatctatccctgtaagaactcagtccgttctcgtctacaacaacgacctctcccggttcaacatctcttatatactcagccccgattgaatcaagggcacaggtttctgacgcaaatacataagaattctttatcttaccgatacacagcggtctgaatccctgagggtcacgcgccacaaccatacgcttaggcgtcattataatcagagagtacgctccgctgatttcacccataagcttcatcatagcttcggcagtagaattagtcttaatacgttctttagccatgagatgagcaattatctcactgtcattattggtttggaaaatcgcgcccttatcttcaagctcttttctgattttatctatatccacaaggttgccgttatgaaccaaagcaaacgtacctttttgatatttggaaacaagaggctgagcgttttcacggctgcttgaacctgccgttgtataacggacatgtccgacagaagcacagccctgaagctcatttaacacaaaactattgaatacttcctgaaccagtcccatatccttatattgcagaatttggatttttccgtcctcgtcaatattgtttacagcaattccgcagctctcctgacccctgtgctggagtgcgtagagcccataatacgtaagccgggcaacatcaagattatcacccatatcataaataccgaaaactccacattcttcatgaagtgaatcggaaccaaaaatctcattatgtttactcacaagaaacctcctaaacgatttcagctgacgctgtatatttttataatttaaacagtttcacccattaaacgtttcataatttcttcataagcgttctcaacaccgcccatatcacgtctaaatctgtctttgtcgagtttttcatttgtgtccttatcccagaaacggcaggtatccggagaaatctcatcggcaagaacaatagtgccgtcacttgttttaccaaactcaagcttaaagtcgataagtttgattcccaaatcaagcaaatacttccttaagatttcattaactttaaacgcatacttagctatagtgtcaatttcttcctgagttgcaagacctaaagctaaaacatgataagagttgataagcgggtcgcccaaatcgtcgttcttaagactgaactcaagcgttggagccaataactccttgccctcttcaacaccatatctctttgaaaatgaaccagccgctacgtttctgattataacttcaagaggtactattgtaactttcttaactaatgtttccctatcggaaatctctttaatcagatgagttggaatcccctgctcttcaagcatcttcataagatggttggtaacacggttgttaataatacccttagactggattgtcccctttttttcaccgttaaacgctgtcgcgtcatctttgtagtcaaccattaaaacttcagggtcatcagtcttaaatacttttttcgccttgccttcgtagagctgttcaagtttttccattacaattcctccaatatatataaatataaattaacaacaaaaatacagtataattgtaatacattcaataataaaatgcaagagttaaatataagaaaaatataaaattttgtctaaagtttttttgccgggaaaattaaaaatgtgtaaacttgacatatttatataataaatttatatcgcttgcagtatgtgatttgttcataatagttccgtttaaaacataatcaatagtttttatgagttaataatcaaatttttcgaataataaaatatatattatttacatattttgggaactaatatttaattgattcgtctaatataacataaatcatatgggaggttttatgtcatgaaaaaacaaatttcattattggttgcttctgctatgctgctctcatcttctgcggctatggcgtcgcaaagcgatgaagcaataaaatctatgcagaatgcaggaatagttataggcaatgaaaacggcgatttacaattggacagcccggttacccgtgctgagttttcgaaattaatctatgaagttcttgaatcagaaaattcatcaatactaaactttgatgatacctctttagaattttcagatattaattcagatttttgggcttataactatataatgccgctaaagaacgcaaatattattaacggctatgaaaatcaaacctttatgccaaatgaaaacattttatttaaagaagccgcaaagattgcggctgtctccgcaggaattatttcaaccaataaaaattatcctttagattatatcgcagccgcaatagataacggacttatggacggggttcaagcgcttagcgaacaagctatatcacgcagtgacgcaatcaatattgcatataatataaaaaactttttaaatctaaaaactgaaatcagcaatgcagaaaaagctaaacaggatgagactaataataacaattataattacactccacaacaaagtgtaaccggcagtacatccggcggaagcggaaacggaagcggaggcggaggttcagcgataaactcatctaacagcacttcttcagttccgtggtatccgagctttgacacagaggaatatacaaaagaagacgaaaatatttttaaaaatcctcttacatcaccgttttccactttctcaattgatgttgatactgcgtcttacagcaacatgagaaggtttattctaaatggacacatgccgaagtacggctctataagaactgaggagctcataaattattttgattacgactatcctctcccggaagatggaacacctttttcagtatcctctgaaactgctgtgtgcccatggaattctgataataaactgactatgatttctattaagggagacgaaattccaatcgaagaacgcaaacccagcaatttagtatttttgattgacgtttcaggttcaatgttttcagaaaacaaacttccgctcgtaaaaaaatctttgaatttgctcctgagcagacttgatgaacgagacacaatatcgcttgttacatacgcaaacggcaccaatatagttttagacagcgttaacgcatcagataaagaaactataaaaaatgctgtattttcattgcaggcatgcggcggaacaaacggatatgacggtataaacaaagcctatgaattggcagagaaaaatttaaaagacggtaacaaccgaattatattatgtaccgacggcgatttcaatattggaccttcttcaactacagaacttgagcaactggttactgaaaaacgcagcaaaggaatatttgtcagcgtgcttggttttggaaccgggaattacaaagacaacagaatggaaattttggctgacaaaggcgatggaaactacgcatatatagacaacatcaaagaggccaaaaaaatattagctgatgaaatgataaagactttgtatccaatagccaaagacgttaagcttcaagttgaatttaatccatctaaagttaaagaatacagacttgtaggatacgaaaatagaatactgaacaatgaagattttgaagacgacgaaaaggatgccggtgaacttggcgccggggctgttgtaaccgctttttatgaaattgttccggcagacgggactgaaacgcaggacttcagataccgggatacaaatgcaaaaccgtctgacgagcttatgtatcttaaaatcaggtataaggaccctgacggcactgaaagcaagcttatagaagagcctatcggttcaattataaatacaaatccgtctgagaatttcaagttcgcttccgcagcggctcagcttggaatgattttaaatgattcagaatataaagggtcggctactcttgaaaatgtaattaaacaagcgcaatcaggggttggtaaagatgaatttggatttaagcatgagtttattcagcttgttgaccttataaaatatataaattaagatattgtttgtgctatactttactatggtatttaaaacccgcttctaacggcgggtttttattatgccttttgtattatttctttcttttatttttcaatttactttttatatattcagattatttttgtgtggttattgaaatattatttccgttactttccataataatatcgccgtttatatctgttctgaaaatttctgagccctcgtctgctaaacggctcagaacagcttctgacggatgaccgtagctgtttttctttcctaccgatataactgagtattttggcattacctcacgcaggaatacatacgatgttgaagtttcagaaccgtggtgtccaactttcagaacatcggctctgagattacagccctgttctataatattttgttcttcatcacgctcagcgtccccggtgaatagaaacgatgtgttgccgaatgtaactttacagataatagaagtattattcatattacttgagcctaagccggcagggacaaagaattccacaatacaaccgccgaatgaaattgtatccccggattggggatgaatcatttccaatccttgttcggcaacttttgttttaaagttattatatgctttgctggtgctttcttttttgggggcaaagacgtttttaacttccatagtggagagcggagcggagagaccgccgacgtgatcctcatgggcgtgggagcaaatcatataatctattaaggtaacatttaacttttttagataagagaatatcagactgctgtcggcggcgttaccgccgtcgatgagcatagattctcctccgcagaggagaagtgcgcagtccgcctgacctacgtcgataaaatgcacggataatttatctgatgaatcaacagacaaattatttgcataaaaagaagctgcaggcgttggctcagataattcagactgaatgacttcagagttttggcaacagccagttattaagaatatagataatatactaattaataaagaaaattttttcattttaataacttctttcaaaatttatattaacaattattatcatataagattatttaaatttaattagaagatatattttagaaataaaaaactttatatttaaatcaacaaatataatgcacacatatattcaattatatgataactatatgtctataatttatattatatgtcattaatcaatttctgtaaatagttaatttataataaattatcatatataatatatatataataatttattgtctatttatgtttctatttatttaaaaaatataaccaaatataataaaataaacacgcttgacaacaatgagtagaaaatatataacaaaatgtcttttttataaattatatgtatatatcttataactatatggtgttaattttaaatgtataatggtttaaaatataaatagaataattatatgtctattattaattatatatatatattattactaactaatatataaaatataatgaagggattgtgtctggttatgtttgattatgagaccttccgaataaatttaaaattaagtcgaaaaaagctaaaaattactcaagaggatattgcaaactcgattgatgtatctgtaaaaactattagtagaattgaaaattcggaaatagaacctaatttaccaactgtaattggtattttaaattatctaaattgttcggttgaacaatttatgacaaaaactgatgattatgaaagaaaaacaattataaataagataaatgactatattgaccaactgtctgaagatgaaaagaatatgcttatgaaaatgcttcaggaatataataaaggtgttgactgaaaatgaaagaaattaataaggaaactatttcgtttaatatagttaaagctcgaattctagccgatattacacaaactgagttgatgaatagaacaggtttaagccgaacctatattagtgctttagaaaataatagaggagcaattccaagtatagaagttttatgtaatatagcagatgctttgaatgtaaaggttgacaagctattatatgaaaatctaagttactttaaaaaacaatcaaataattttgagttagaaaaagaaattaattttttatccgatttagaattggatattcttttatcagcattaagagtatacattgaaaacagataagcactttaataaaatttaatgttaggtgatttcacatgttcaattatgataattttagaataagtttaaaactaaaacgtaaagaacttaaagttactcaggataatattgctagtgctactgatatatccgaaaaaacaataagccgaattgaacaaaatgataagaaacccagtttagaaactgtcatagcaatattaaattattttaatacttctatggaacaattcatgtcacaacagaatgatttggataacgaaaaagctaatcttattaataaaattaatagctatttatcaaaattcaatgacaaagaaaaacttttttttattagatttattcaggactatagaaggagcgtagattagtggaaattaataaaaaagctatagccgaaaatattttacaatatagacttaaagcaaatataactcaaaaagaattagctcagaaaacaaaacttagcagaaattatataagtatattagaaaatagtaaagataaagcgccatcaataaaaacattagatttgattgcaaatgcacttaatattagtatagaccaactcctatttgaaaatcttgattattttactaaaaatagtggtgatttaattattgataaggaactaagttgtttaaatataacagaattaaatattatcttatccatgctaagaatatacaatgataatcattataagttactttgagtaattgggaaattgaaatatttatttcccaattctatttttttattataaacaaataggtgaagttataaaaaactgtatatagcaagcatcggcagggtgtacggagtacaccacgttaggcgcgcagccccggacatatttttatattctgtgaccttatatacttagtataaattatatatatgactgtgtaaactgcgtactaatagaccttttgtctatgtaaatgcacccaaaatgtaatacgaatataaaaatatttaattattctttaattacttactttgctgagccagaccctgtttcgcccgccgaacccgggcgagatcggcttccctttctgggaagccgattaagttaaaactttaaaatacaataaaaaaagcctgcaaatgagccgacccaattgttagatttttggtctaactcttttgggtcacctcaaacgcaggctttttaatatttattattcaactgtaactgattttgccaaattcctcggtttatctatgtctaaccctttcaatgatgatacataatatgaaaacaactgcagcggcactactacttcgctaggcataaccagctcgtcgcactttggaaggtagatgacataatccgcttctttttctatttccgtgtgtccctcttccgctacggctattactaccgctccgcgggcttttacctcttttatattgctcagcatcttatcaaacaaattcttgactgtgcacagcgctacaacaaccgtgccttcttcaatcaatgcgattgttccgtgctttaactctcctgccgcatacgcctcagaatggatatacgaaatttcttttaacttaagcgacccctcaagcgccacagcgtagtccaaagttcttcccaggaagaacacgcttttgctgttaaaatacttagacgctatatactgtatctcgcctttgttttccaaaagtttagaaatattatcaggcagcttttcaagagcctttatatattttgccaaaagttcaggtgtcagcatatccaattcctgagccatatatatagtcatcaaataaatcgctgtcagctgagtgctgtacgcttttgtggtggcaacagcaatctcaggacctgcccatgtatagagaacgtcatccgcctctcttgctatacagcttcctacagcgttaactatggcaaacgttcttgcgcctaaccgctttgcctctctcattgccgcaatggtgtccgccgtctctcccgactgagatatcaaaatcaccaaagtcttatcatcaacaagcggattgcaatatctgaactctgacgctactattacctcaacaggtatgcgaaccatgctctcaatcacatattttcctactactccaacatggtaagcactgccgcaggccacaatatatatcttgtttatatcacggatataatcggctgttaaagatatatcatccaaaacaattctaccgtcttttattcttgggtttacagtatcagctatggcacggggctgttccattatctctttaaacataaagtgctcataaccgcctttttcagcggcggaaatatcccagtcgacaacaaaagtttccttagaaatttcctcgcggtcggtgttataaatttttacatcgtcttttgttaagacaacaatctcattattttcaagaaaataaacgttcttcgtatgcttcagaatagccggtatatcagacgctataaagttctcgccctcgccgagaccaactataagcgggctttcttttctgacagctataaaagaatccgggtcgtcggcacaaagcactcccagtgcataagaaccgtcaaccttgcctataaccttaatcatagtgtcgattatatcgccgttatagtaatactcaaacagatgcgctataacctcggtatcggtttccgaaataaactcaaaacccttttttgtaagatactcgcgaagcttcagatagttctcaataattccgttatgtacgaccgcaaatctgcctgactggctgagatgcggatgcgagttcatatccgacggctctccatgagttgcccaccttgtatgaccaattcccatagtgccttttattgcgtctccgccgtctatcatattgctgagtttttccaaacggcctttctttttcttaaccactattccttcatcagtcattatagcaacgccggcagaatcatatcctctatattcaagcttcgacagcccgtcaagcaaaatcggcgccgcctgctttgttccaacgtatccaactattccgcacataaaattaacctccaaaaaatattgacagctattgccatcatacaaatctatcacaaaataatataatttttatcaaaatagcttctgcacatatgtgctattgaacagaaccggtatgttccgtatgataccactctttcttgttatgcttaaaaatcccgactatcccaatcggtatccagcttactatatagagcagaaaaccaaacaaattgaaaattgttttccggctgagcttgttttccaatataagcccggcaaaggcactaagagcaccgatacccaaatataaattaagagccacatagcagacgggacgaacccacaaactgcataaagcaaactgatatccaaacaaaatagaaattgtggagaaaatacttatgaccaaaaaaactccataacagaactgacccaaaaaatctccgtaaaggctcagccagtctattatttttccttttttgagcaagagacctccgtatctgccctgaacgtcaacaacgccctgagcccacctgattctctgcttaaccgacttaccgaactcagcaggcttctcatcatataccaccgcctttttagcaaaggcaactttaattcccatcagtctaagtctgacagtatattcaaggtcctcggcaaggcagtcgtcagaaggcatacagcgcttcacaacatcaaacctcacagcatacccggtcccggatattttacaccctattcccaggttatggcacgacatttttgccagcctgctttcaagagtatgccaaaccgaataggccgctgtcagccagttttcgttcggatttttgctgtcaacatatccttgaacagcagaatatccgcagttaagcatctcattcattctcattatacaatccatatgcacggtattatccgcgtcaaatacggcaatacagtcatattcttctctcaaactctttatatgctccacagcgtatgaaaccgcggacgatttattgttattaccggtacgtttaacaagaactctcgctccataactccccgcaacagcagccgtattatcagaacaatcgtcggcaacaacaaacacatcatacttattctttggataccttgaagccgaaatactgcttaaaagctggcccaaaacagcgccttcattatgagcaggtattataaccgcgaacctgtttgtccgaaaatcttgtcttaagacgtcattccttttaacaaaagagaatacgccgcagacgacataatacgtaccaataaaaaagaggaaaagctctaagaaatcaacaatgatttccaatacgtacgtatgcacaagcctcaccccttacaatatagagagattatataatattagaccgcaaatatcaagtgtgaaattattacatttttctaacaattgcacatactaatatatacaattcacacatcatatatgccatatttgccaaaaaaatggcaaaattaagataaaacaataaacaaccggcacaaaaaattgtgattttttatattagacaaaagtaaatttatgtgttataataaatgagtataaatataagtaagaactcatgattttttaatatgaagtgtttaaaatattctgagtctggaggattaatgaaaaccaaaacagtttttgtctgcacagaatgcggaaacgaattccctaagtggatggggaaatgcacagcctgcaactcctggaacactttggttgaagagacagtaattacaaaacagccgggtaaatcttcgcgctcaggcatgaagtcagacgctatttcggctcttgaaaacgcgggagactcagcggttcccgagcgtctgaaaaacatatcaacaactgacgaaatcagaacaggcacaggtctgtctgaatttgaccgagttttgggcggaggtcttgtcgcagggtcgctggttcttttaggcggagacccgggtataggaaaatccactattctgcttcaaatttgccagcacattggaaaaacgcagaaaatattatatgtttccggcgaggaatctctcagacagataaaattaagggctgacagactgggtgtggacagtgacaatataaagattttctctgaaaccaatactgaaaatatacttgaatgtatatccagggaaaagcctgatattctcattgtggattcggttcagaccatgtttaaccccaacgtgaattccgccccgggcagcgtttcacaaatacgtgacgtagcttccatgcttatgagaatagccaagacctattctatcgcaacttttttggtaggtcatgtaaccaaggaaggctctatagccggaccgaaggttttggaacatattgttgactgcgttttatactttgaaggcgaccaaaaccgttcatacagaataatcagggcaataaaaaacaggtttggttcaacaaatgagataggcgtttttgagatggattcctcaggtctgtctgagataaaaaatccatcgtcagctatgctttccggcagaccccagggtgttcccggaagctgtatcgtatgcacaatggagggaacaaggcctgtgcttgctgagattcaggctttagctactccaaccgcttttggtaacccgcgcagaatgaccaccggtgttgacttcaacagagcgatgatgctgctggctattttagaaaagcgcgccgggcttcatctgtcatcttatgacacatatatcaatgttgtgggcggtctcagaatggttgaacccgcagccgacctaggaataatcatagcactggcttccggcttcaaaaacaagccggtacctgaggagatagccgctgttggcgaagttggtttaactggtgaaatccgttcctgcagttttcttgaaagcagaataattgaagctgaaaaaatgggatttaaaaaaattattgttccttatatgggagcaaaagaccggaaaaagtttaaaaatatagaaatctgtcaatactcgaatataacgcaggtaatgaaagatatattttaaacggatgtaaacagactacgtactcacaatgtttgagtattgaaatctattttatgcaaaatttagaaaggtgatgttattttatgtttcaaattggtgacaaagtctcttatcctatgcacggagcaggtattataaaatgtgttgaggaagagaaaatactcggtgaggaacaccagtattttgttttagagccctgcgttggtgaactagagataaaaattcccgtcgcacggatagaaaaggttgggataagatatatagtatccgagaatgaggcagacgctgtcatcaatgacttcgaaaaatgcagctgcgacgaagatgataactggaataagagataccgggataatcttgaaaaattaaaagacggagacttgtttgaaatcgcaagagtaacaaaaactttgataatgagagacagaaagaagagtctttcaaacgctgagagaaaaatgctcagcaacgctaaaaccatattgatttctgagctcgttttgtccaaaaactcgtcgtattctgacattgaagatatgcttatgagcaaaatttcctagcgcgaaaggatttaatatatgactacagcaataatcgtagccgccggcagcagcagccgtatgaaaactaatataagtaaacagcttattgagcttgacggcattcctgttataatcagaaccataaatgtttttgagtttctgtctgaaattgattctgtattaattgttaccagaaaatgtgatattgaaataatcaaaaaactggtatctgagcataatataaaaaaagtcagcgcagtaatcgaaggcggaatcacaagacaggaatctgtttttcttggtttgtctcatttaaattccggcaatgatgatattgttctgatacacgacggcgcgagaccttttgtatcagcggattatataaaagaaattatatcggaactccgcagcggctcgtcaaaggccgctgctattggcgtacccgtaaaagatacaatcaagcaaacaaacgaacgcggatatattgaaaacactcctgacaggagcaaacttgtgtcaatacaaacacctcagggattcagatatggcattattatggaagctcataaaaaagccaaagaattgaacctctccgtaactgacgactgtgcagttattgaagctttaacaagtgaaccggtgaaagtcataaccggagattataataacataaaaatcaccactcccgaagatataatccttggggaagctatcatcgctaaaattcaaaacaatacataatactggggttgtcataccatgcaaaaaatattaacgctcagcaatatatctgaaatcagcggaattatcggcggcaaagttcaaaagctcctatcaggtgacagacatcagatagaatttttttgcagctttgaagatttcgatttattatccttcaactaccatgaaataaaagataaacaagactctaaaatcacaatttatctcgacaaagaaaatatattttttatatgtcatgaagagcctatgcttagggtcgctgaagaacttgccggaactgccgcctcggacggttcgctgaacaacgaacagctcctgtatcatttttttgccaggctgctgaaaaacgatatggcatggcttgatgaatacgaactccgcatcactgataatgaagatgaatttatttcaggagaagaaaaagattttacaaggaagattatttctcttagaaaagacctgctgaattttaaacgttactaccaacagctcgaactaatatttgacgagctcctggcaaatgagaatgatttgctctcagacagcggcgtgcggtactgcggaataatacagcggcgcatagaccatctcttaaacgacgcggtcaatctgagggactacatagcaatggttctcgactcttatcagtcacagcttgattaccgtcagaacaatctgatgaaagtattcactgttgtcacagctatctttcttcctcttacactgctggcaggctggtatggaatgaattttgatatgcctgaatttaaatccgtttacggatacccggcagtaattgcagtaagcgccgcgatagttttgtttctgataataatatttaaaaagaaaaagtggatgtgatatatatccaccggagaccaatatgctgattcaatttgttatggtagggctcggcggagcactgggatccatgctgcgctatttaataagtttaatacctgttaacaacacctttccgtttttaacactgataaccaacttgctgggcgcgctgttaatagggtttattgtcggactttcggataatctatttatatcaaaaaagtttttgttatttctaaaaaccggtgtatgcggcggttttaccacgttttcaacattttcacttgaagccgtacaactgtttcagcgcggcgaaccttttttgggaacgatttacgcaatactcagtgtcatcctgtgtctcttgggtatcattctcggagaatatcttgggaggctcgctgtttaaacaacaaaattatatcgtaagtccatgactttctaaattataaaaaaacagacataaccgtctccgcttttacgcatttgactgtacaaataatattaccgcaaggagagtgaatttatattgacaaataataataatgatattagagtcggcataggatatgatgtgcataagttgaccgaaaacagaaagctgatactaggtggagttgaaattaaatacgaaaaaggtcttgacgggcacagtgacgctgatgttttaatacatgctgtaatggacgctcttctcggtgccgcagcgctaggcgatataggaaagcattttccggattccgacaaagaatataaaggtgcggacagcattgacctgcttaaacatgtaggcgagctgctgaaaaaccatggttatgctgtaatcaacatagattccgtgatagcagcacaggaacctaaacttgcaccgtttattgagcttatgcgcagcaatatttcctctgctctcaatatagatacagaccgcgtcagcgtaaaagccaccacaacggaaagacttggttttgagggccgctgcgagggaatttccgctcaggcggtatgcagtataaaaaaggcacaataagaataatctgatactgctaaataaaaataccatccaacatttcagcagttaattttattcttatgaaaatcgaacggcaccctcctcttttataccgaagagactagcttttttaattgtaattgtatagaaaaaattagaaatcaatgattattgtattataattgaatataactgacaataatagcatataattccagataattaagtttgatttatagactgaaaacgagtagaatagcgttagcactcaaacaagacgagtgctaacagattagataattaaatttaaggaggcatataaaatgaacattaaaccattaggagacagagtagtcacaaaaatggcggaagccgaggagacaacacaaagcggtattattttagcaggttcggctaaagaaaaacctcagttcgccgaggtcattgcagtaggtccaggcggagtggttgacggcaaggaagttaagatggaattaaaagccggcgacaaagttattatgagcaagtatgcaggaacagaagttaaacttgacggcgaagaatatgttattatcagccaaaaagatgttttggctattgttgattaatccagacttatacattattttaggaggtaatgcattatggcaaaagaaataaagttcggtgaagacgcaagaaaggcactgcagagcggtgttgatcagcttgcaaacacagttaaagtaacacttggcccaaagggaagaaacgttgttcttgacaagaaatacggcgctccgctcatcacaaatgacggcgttacaatagctaaagatattgaactcgaagacgcttttgaaaatatgggagcacagcttgttaaagaagttgctacaaaaacaaacgacgtagccggagacggtactactaccgctactcttttagctcaggcgctagtcagagaaggactgaaaaacgttacagccggtgctaatcctatgatagttaaaaagggtatcaagaaagctgttgacgtagctgttgacaaaattgttgaaaacagcaaggctatcgacggaaagaacgatatagcccgcgtagcttctatctctgccgcagacgaaacagtaggcacacttattgccgaagctatggagaaagttacaaacaacggcgttattactgttgaagaatcaaagactgctgagacatattctgaaatagttgaaggtatgcagtttgacagaggttatataactccttacatggtaacagacaccgaaaagatggaagctgtaatcgacgacgcttacatccttatcacagacaaaaaaatctcaaacattcaggaacttcttcctctgcttgagaaaatcgttcaggaaggtaaaaagcttgttatcattgctgaggatatcgaaggagaagctctctctactcttatcgttaacaagctccgcggaacatttacatgcgtagctgtaaaagctccgggattcggcgacagaagaaaagaaatgcttcaggatattgctattctgaccggcggacaggtgatttcagatgagctcggccttgacttaaaagaaactcagacaaaccagctcggccgtgcgcgtcaggttaaagttacaaaagaaaatactattatcgttgacggaatgggtaacaaagatgacatcaacgcaagagttcatcagatattggctcaaatcgaagaaacaacatcagagtttgacaaagagaagcttcaagaacgcttagctaaactttcaggcggagttgccgttataaaagtaggcgcagctacagaagttgaaatgaaagaaaagaaactcagaattgaagacgctctcgcagctacacgtgcagctgttgaagaaggtatcgtagcaggcggcggtactgcatttattaatgctctcccggctattgaagaacttatgaactcactcgaaggagatgaaaaaacaggtgctcaaatcgtgctgaacgctcttgaagagcctgttagacaaatcgcatacaacgccggtgttgagggaagcgttatcgttaataagataaaagacagtgaagttggtgttggatacaacgctctcacaggcgagtatgttgatatgctcaaagttggtatagtagacccgacaaaggttacaagaagcgcaatccaaaacgcttcaagcattgcatctatgattcttactacagaaagcgttgtagctgataagcctgacccggctgctgacgctgctgcagctgctgctatgggcgcaggcggcggaatgtattaatataaatatcatcacaaatagaggtttttagcatattatactactatcaaggagttgatggcagtatgataaatcaaatcttgttggtgtttgttggtatatttgcgataattggtcttattacattcctctatggtatcgtggaagggctcagtcatgagaaaaaaactgaggttccgtctgagcttgtcgtatttgtcaagaatcaggaaagcgatgtggaggggctcttgagacaattatccggaaaattgacttccggaaacgcaaacataacagtcagcggactttcagttgtcgattacggttcttctgattcgaccgccgaaattctcaaaaaactgcaagcagacattgacgtcttaaacttctatacaaaagacgaatatattaatcatataaacaatttaaataatctcacttaataatactgattatttaaataaaaagttctctccctctgtgaaaattcacagagggatttttttgtcaaatatattcaaattgttcattaattattttttattttaatacagtcagctgttaatgtaagacgcccgataattggaaaggctgcaataattggaagataattaaatgtgttttatgcaaacaacggcagtgcatgcttgcacgcttcgacaggtgagccgtcatatcacgctaagcgcaaacatacttaaaaaagttcattataaaccttattataataaattttcagcaaccgtgcaccttacgcagcagatttcatccgccttcacaactaagtctgattattgacattgtaaattaatcaaaacaagtcactttgaatcacacccgtctttcaggttcagtcaaagccatacaattcatactatacctcatttttatataactttttatttaaaatattatcctatataccgttgtttacaaaaaacactcttaatttttctgtctagttttctgttaaccttgcaaataatttacaataatttattaatataataactttgattattataaaaacttcaaaaacatattccgttcaccaatagtaatatgatattttacaaattggttttaagataagtgataataaaaaaagactgctgaattcgtacagcagcccattaaatacaaattaattatatagcatgttaaaacatatgttgcaaatttataaaaatcacagaatttattataaaattcctatacttatttcattaatcattatcttatttgccttcgcagccgtgcttttcctctccgcacttatgttcgccgcatgaatgttcatgatgactgcatttaacattaggattataacccaagtttctatctatcaacgcttttacagcatcgtcagcatttccagaaacaccgccgtaaagagtgatacctgcctcagctaaagcattccgggcgcctcctcctataccgccgcaaatcaaagtatcaacttcattttcaactaaaaaacctgcaagagccccgtgaccgctgcccatggtattaacaacattggcgtcaattatcgttttgtcttcaatattataaatcttaaaattttcagtatgtccaaaatgctggaacacttcaccattatcataagttactgcaaccttcattttaccttctccttttttctttacaactaaattttttattgattttaattttttacacctttttccacagcatttgtttaccgaaccttcgcaaatccgatagtttcctcctgtgatacataatatttttccattagcaatactgtcagcaattttaaaacgtgccttttcatacatatctgtaaccgtaactcttgaaactcccataagttcagcacactgctgatgggtctttttttcaaggtcaattaatcttaccgcctcatactcatcaacagaaatcatacatttctcagcattttcaacgccaagcggtgcaaaactgttaaacttaggctcttcacatattcttctgcatttaaaaggtcttgacataactcacctccattaccgacatatgtcgataatattatatactatatattcatgaaaatcaagtattttttaaaaaatatatgtttataaattataaaaataaattatttaatatacaaacagcttgttttattgataaatttaattttaataataattatttataaatatgagttataagatttttatttaataggataaaaaagtaaaaatacatttacttatattgaaaagagttgtataatagaagaaaagatttataatgttcaatattttataaattataaaacaatattatttgagaattgaaaatattatgtaaaaactattttatcgcattacttaaaaccaagtaaagaataaaaatagaagcataaagcagtataaaaaaatatctaaaataacagtgcgaacctgaagctcccataaaatgtcagggaggttcgcaccacttttaaacagaaatatataagtattttttaaatatgactaaggtatagaatacatttaatatatattattcttatttaatataaaaatacataattatgataccttaacaaatttattattgtatatttttgctgttgcactctacacgagtgcgtggattgaaataacattcattattgaaagtggagcagacaaacctccagtcgcactctatacgagatgcgacgtatatactttggtaaatctctgtatcgtcgtcctatgcgagtttgtggattgatatttctatctttgtacaaataatgattaactttatagtctcaacttatatttaaatataaataaaattattaaaaactcataggtcaaaatcgcctatacaaattttgtatcttcccctctgctattggcagaaacttacgttgacattaagtaaatttacatatattttaatctatctcatatatgttttggaacaaaatagtaaaacagtttattataaatgtgaaaaattctgccatactgggtatgtataaaactataatatattacatgcaaaataatcataaaagtcttcaatataaatacgtaaatattatttatctactttttaaccaatattaagttatgcaacatgccatgagaagaatgtgcattcaaccatgtttgctccgcgatacaaatgacaattcctattgtttcctatatagaaatagactgaaattaaatttccaattcaaaattaaatcttatttattgtcataccttatactcactctagattaaaataagctttccaaaaaactttatacgtctgcaaaattgttattcataaatgaataatttttataaaacacttattatacaatatacagatatataaactaagtttgtgtgttcaattgcatatatgtcctgcacagtacagatagaatatttgatacaaaatgcgcaaacgcagcgaattatcggccctatgtaaaactgtcgattaaaaataaacttatatgatgacaaaatcagtgtcattttccgctacaatatgcaaatagaaatatataaacatttactttattataatagtaagaacatcaaacaaaacggaagatgttggattgaaacgagggatatgggaatgataatcccggtgcaaaattgtcgcacccataaagggtgcgtggattaaataaacatatatttggaatctgctttgaatggacgttctattttaaaacaccacgatataagattataaaaatacttttgctattgtttgctttatgatatgttaaacattcgcatcaaaagctaatgatgtgtaaattagttcgtatgatttacatatataatttatactcaaatttgttttctctctgctaacactaactattttttacagcaaacaaaaaggacagcctatcattcgaattgctgtccgcattttgttttatacttaatttcaatattgaaattaaccatatttattcatttttatttcttaaaataatatttggtaattgcttgctatatatcattgccagactgggttatgtaaaataattttcataagacaaatatcgtcgcccatttttatacttttgagcaattctacatcaatatcacaattaaatgccttttcaaaaagaaccttgctgtaacctgtagtgcactgacaccatgtatttgtctctaatttatccacttcggaaagcattggacaagggcaaaaatcaaattgcagaaaaagttctccgtctttacaaaaaagcccagcttcttttgctttctctgtatttgcaaattcttctatatttgatgaatctgacttcagttccattacaagtgcaattttttcgtccatttcgtaaccacattgacagttcattcttattttctttattgtttcggtttcaaaattgttttctaagcgaatcattgatgactttacccaatcagaattattttctgcttttgacatattgtctttaccatacaccacttcattcgctatatcctcattgctttcagcccttacagcttcataaattatattctcttgaatttttctaatatcgaacatagtttcctccatatattaaatatttattgattaatagaatttctaacaaaacacatattactgtacttctaaacactaataatattttaggaacagtaatttgtattttattttctatacaatgtttctttattaatttatttggtatatgagctcccaatccactccggtgaagtattactgaacaccattaattatataaataaatatatcttctgacttctgaattcttgctctaattaaattggaatacataaatccataacaactctatgactctttctgtcaatgccgtgataaatattcagtccatacctctgagtcattttataaccgctttgaggcatccaaacactgaaaataccttgtaatatctcataaatatcttcgatttttccatcataatgatacacaatacatttgccgcctttaatctccgtaacattattcaaattacaatttcggtctgccgtcatgcaaatgtcacaaatacactgcgacagatttgttatagcagggtcattataaaatcgctccaccagaactgtattttcatttaaataagtattatatctatctaaaaactgataccagttctcttcaatatcttcgtaacttccaataaaccgctcataaatcacaaaaaagttattaagttcttgaatgtcaattcgtgcggaatactcatctgcagttttaaaattaacaactctctccggtgtaaacggaactgtcatactattagccggaattgactgtttaaacatagtgggagaaatattacgatgttttttaaacaccgagctataattggaagaactgtatccgtaatccaatccaatatccgtaattgttttagctgggttcagttttatatctacagcgctctggtcaaccttacaccgtttaataaatgcataaacgctttcaccggtttcttctttaaaaattcggctgaaatggaattttgatatataaaattcagaagccaaaatatcaagtgataaatctttatctaaatgctgcattatatagtcaatactttgattaacaagctcttttctatccatatatcccattcctccacatttcttttacgcttattatccactatccaactagggtttgtcaatcttatgttgctgcatatctcattagataagctgccatatcacgcctagtataaactttaaacagtttgtcataatcctttttactaataaatttttccgcaactgcgcaccttacgcggcagatttcatttgcattccgatgtttgcaagagcacatttttatataatattaatattatttttatgatatatgaccttaacatttgtgtccaatttattgtagcctaaccaattttatatgaagtattatttggcctacacataccttacaggatcagtcataatttgccaattcagattattgacattgtaggttctaagtcaaagtgtcattgcggctgtacacatctttcagatacggtaaaagttactcctcagacgcttgctatgccacatttttatataattatttatattactcagccttttcatttctcttcatattattgcagcctttacaatatattgcataaaacatatatacgcatctgcttaaaaataatatttttatacacttccattaaatatctgcaaatatagaaactgcccgcgtctgctcaccagtaaagtttggtgcgcaaaacgctggcagttctgttatttttattatatataacacttcagccgcttcaattcaacccatataaagcaagctgaatcaacgcagttatatttatttcatagcttcttcaacagcaacggctactgcaacagtagcgcctaccattgggttattgcccattcctataagtcccatcatctctacgtgggcaggaacggatgaagagccggcaaactgtgcgtcactgtgcattcttcccattgtgtctgtcataccatatgaagccggaccggctgccatattatccgggtgaagagttcttcctgtaccgccgccgctggcaactgagaaatacttcttgccctgctcgatacattctttcttatatgttcctgctacaggatgctggaatcttgtcggattggttgagttacctgttatagatacatcaacgccctcaagatgcatgatagcaacaccctcgcgcacgtcgtctgcaccgtagcagcgaacctttgaacgctcgccgtctgaatattttatttccttaacaaccttaacttcaccggtgtagtagtcaaactgagtttgaacatatgtaaacccatttattcttgaaataatttgagccgcgtccttaccaagaccgttcaggataactctcaagtcttccttcctagctttgttagcgctctttgcaagacctatagcgccttcagcagccgcaaatgactcatgacctgccaaaaaggcaaagcattttgtctcttctctcaatagtctggcgcccaaatttccgtgacctattccaacctttctgtcatctgcaacactgccagggatacagaaagactggagaccaagacctattttctcagctgcatcagcagcattggtacatccgtctttaatagcaatggcagcgccgactgtatatgcccagcaggcattttcgaaacatatcggctgaatatcctttactatctgataagcgtcaacacccttatcgtcacaaatctgctttgcttcttcaatagaagaaattccatgcttttctagctctgcattgatttgctcaattcttctttcataactctcaaataaagccatatctaaattcctcctattcttattcgtgacgcgggtcaatcagtttaactgcatcgtcaactcgtccgtactgaccgctcgccttttccaaagcttcgtttgcgtccataccatttgtaatcatttccatcatttttccgagatgaacaaacttatatcctataatagtgtcgttttcatccacagcacatttagtaatatatccttctgcaagttcaagatatctaggacctttagcaagtgtagcatatgtagtaccaacctggcttctaagaccttttcccaaatcttcaagacctgctcctataggcagtccatcttctgaaaatgctgtctgagtacgtccataggcaatctgtaggaacagttctctcattgctgtgttaatagcgtcacagaccaaatctgtattgagagcctctaaaattgtcttaccgacaagaatttcagacgccatagctgctgaatgcgtcataccgctgcagcctactgtctcaatcagcgcctcctggataaccccatccttaacattaagagtaagcttacatgtgccctgctgaggtgcacaccagccaattccgtgggtcaagcctgaaatgtctgtaacttctttagcctgcgtccattttccctcctgaggaataggcgcaggaccgtgatacgcacccttcgccaaggggcacatcgcttctacttcacttgaatacttcatatgtttgctcctttcattttgcggaacaccgatttaggcaaaaaaaataaatacaaatgcaccctttcagctgcaaaaccgccaaaattcgattgaaaccgcttactgtgataattatatcataaaattataattatgcaacaggataatttaatttttttaatttctgaaaacagtttggggcatttgacaaaatcttgacaatgtatattgcataaggcgtaaattttgcataaataactccccgggaaaatgtcggagatgcagttctgtctatgaaaacagagctgcactttccgtatctcccggggagttatattttatttatcctaattaataaatcagtttaatcactaagcggtatcatttgttcaaacgaattccaaataaacgcttttgctgtctgtccgtcagataccggaatatcaaaacctgaaacagtaagttttccgttagacatattatctaaaccgacaggttttgaatcgcagacgctcattctgccgtcagcgtcataaacgcaaactactgctaatatatcactttcaggagcataattcatatcggcagtaacagatgtgacttttcctccgtctataacggctttagcattgctaaacgccatacttccaaccgtcacgtcaaattcaactgtaagtccgttatcagtaacagcggttatctttgcggaaccttctctgagcgctgtaagtttggctgtgcaaacaccgttattatcagctgaaacagcattgtctttaaccattgcaacactctcatcagaagatacgaatgtcaccaaagacgtgctgtcagcaggagtaatttttgtcttaatatcaacattatctccggcgtttaaaactatccttttctcagacacagcttcatgcttctcagcaggcttgctgtcgtcagaactatttggcgtgaattttagattttgaagtgtaaatgttatctcaatctttgacggtgtatccgatgaagtaaagttaacagtatggttacttgacgaaacttctttgacagccgaaccgtcccaaccgtttataggatcatttgtatcaaatacgctgttttcttttaatgctgacttaaagtccgtcttggttattgtaagcggaacaccgtcaagcttaattgaatcatatcttatatcacagctgtcaaggggcgattttacagcctgacctgttgctacagcattatcctttatatagactgaagtcaaatttttaagatattttataccggcagttttggctttatcagataaatcggttgcagtatcaaacgaaacagtatattgaccgtctccctttacctttattggcgtgcctatctcatttgccgcataaagagaatcgttataatatacatttgcagccagttctattgattcatcagaagcggactctgtaactgtaaccggaacggttttggtaattccgctcgaggacataaccgttatatatgtctgacctgctgaaacaccaacaattttgccgagaggattgatagttgcaaccctcggatttgatgatgaataaatcaatgaatcagtattatcggcaggctcagccaaaacactcatattaacatatttatctttcatcacctgatagctttcactgtcagttaatattgaggttatttgcttatctgaatttttaggaagaactcttactgtcatttccgcttctttagagccgctctgcgaaaatgctgttatagtcgcgtatcctatctttcttcctcttatcattcctcttgaaacagtagcaaccgagtcgtcgctggatttccacagcagaacgtcatttgttcccaacggctgaacctctgcgcttactgtgacactgtcaccatactcaatatcaatattggcgtctgataaagatatatcggttatattggttatagcaggattgatagctatatcagtcatatcataactcttatttttgcttgacggggttagatagacgcctctcatcatagcgtcggtgatggtcttaaatatcggagcgtttccctcacggttccaaactgagaatgttgaatccggcttctgggtcaaatcaaaccatccctgatcccaaacacacggaacaacctttccaacctggcaagcacgagtaactatttcatcaaaccatgccctgtctatgtcattatatccgctcggattagcactgttcatcttatttctgtttccgtactctcccaatataattggaactttatgtttctttaccatctttgtcaaagccgatacaacctcatatacctctgaatatgtccagctagttttagtgcttgacttatatatatgagctgagaacataagacggttgctggaattatagtaatcagtcggcaatgcgaatccgctttgcgttccaccatttgcatagtgagatactgctgacagccagcgtttagtattatttgagcctgtagaacgcactacattgacgaatatctgatttaaattcactataacaggcgtatctttagtaatagcagcagacgaattcttgtcgctgccttccatacaagttagttcgtttgccgattcaaatataagatgctcgtcataatccttaaaatgctcagctatatgtctccatacgcattcaaacttttcatataccttatctatatcgtcagcggcaactctcagccagccgtcctgctccgctccgtcatgatggatattaattatagtatacatatcaagcgaggtacaataatcaactatatcctgaacacggtttatccacgcgtcattgattgcataaccattttcatcgtcaatcatatccccccatgtaacaggaacacgaaccgtattgaacccagcgtcatgaacagccttaattatttcctgagttgttacaacactctgccatgctgtttctgccggatgaaaacctgtatgaccgtccatagtattgccaagattccagccaacacccatttcatatatagtgttatcaccgcttattattctaaaatccattggatttgaatattccgtgctgtcaacaaacaaaagtttagatttagctttttctaaatctgctctagcactggcatattttgtatcggcaacagaactgttataaactgactgggctgtagttaccgctttttggaacgttgaccaggaatcaggctgatattttgactcatccatcccggcacagtaatcaagacttaatttaagtctttttttatcagtcatcacgcccgggtcttctgtctcaggagccaaataataatacccggttaaagttgcgtcatatcctgagttttctaaaaacgagatattgattcctttcaaagttcctgaggtgagcgaagcttttacatcagcaaccgacaaatatgccgtgtaaacaccgtccgataaaatagaatcgcctatctttatcttgttatcattccatccgccccaggcggtgtcaaacggttgaactgtgaaaatttccgtatcatcggtcacagtacccgttacagtatatgtaacttttatataactgctgtttagcaaatccgcaccctgaacggtttgaatatacccgtcaaatgttccgtctgtccccactctgttagtggtatccgttactttttccagtacgctggtttctaccataccgtcccacgggttagccgcaaaaactgttaccataccagcagaagcccctgcaatacctaaaacccatgttaatacaaaagctaatagtttttttaaatgcacaaaaataccccctctaaaatatttttactttcatatttttcattatatagcattttatacaatacttcaagctaaaaacttaaaaaaatattaaaaacttatatataataacaataaaactgtaatttttaagaatcaaaatatattgaaaattataataaacatcatgacataaaaaatttttattatatatatttcaacatactcaaatatttccgcataaatacagactaaatctacttatataaaaagctgtgcctaaacataattaaatttttgtgtaacataatgtcggaagctgcaatataatatattgaggttacggcaaagccgcataccattaaatattttaggaggatttttgattatgagctgcaaaaatgaatttacaagacagcgcgcagccagctgcggctgtaataatgctgaaacagctgcagagcctgtaagcgttcccggaactgttcaggatactgaaagcgagaacagcgaatgcaaaagaagacgcagtgaagaattttctgagccggtttgtgtgagcgttgacaaagtttatgacgcatgcagagagagaacctgcgttgttgacgagcgcgtttatttcacagagtgtggtcaggaaataatagaaagcgcaataaatgttaaacttaaaaaggcggaaattatctgggtgtacacagacacagaacctgtattatatagctcaggctattattcagtagacataaaatactttattgacgttactattgaagcattctcggatgtttgtgctcctacagaagttcacggacttgtaacctatgacaaacgcgttatgttatatggaagcgaaggtcaaacaaagagttttgaatctacaatcgaccccggagactgcatggaacatatctggaaaagcaacaacatgcctaaaataactgttgaggtagttaacccaatagctctcagcgcacgtcttgttgacgattcatgctgctgctgtgacacaaatgtttctattcctacaaacatttgttcatgttatggcgaagatcttgttatagctaacaacatcaagaaagttcttgtcagtctaggtcttttcactatcgttagaatagaaagaaaagttcagcttttgatagatgcagttgatttctgtattccggaaaagacctgcgtcggagctacacctcaagatccatgtgatctttttgataacgttagattcccgatagacgaattcttcccgccgacaaagacaaatgatttcacatcttctaattgcggtaagaatgaccgcggctgtggctgtggatgcagatgcggaaactaataaaattgcagtaaactttgaatattaaaatttaaaaaccggccggttcgcttttgcggatacggccgatttttctgttgaattattatttatatttatatgaattagaaaaaattttaaattttgggaacttttttcgaataacagaagtcatatttactaactaagtgttgttttaaaaatatatttagtgcatttcgacaaattggtatgattttatacgaaagcttataaatttatttttaagaacttcattatggttatagatttattatatatataataaaaaatttattttagaaagagggattaaaaaatgaaaaaaactttcataaaaaaactgcgttttctgcctttgatgctgacaataactgtgtttatatctatgttctccttcttcacggcatacgccgatgaaccaactaataattacaccgccaaaattggaaatacatattatacttctctaaaaacagccgttgaatctgctaaaaatggcgatgtaattgagccggccaatgaacgagttgttataacctcaggcgaaaaagccgaattaaaatcctcggttaccgttaatggctttacatttggtgacggcggatttataagcgccgccggaaactatgacttttcattaaaaaactgtaaattcacagctcaaaatccatacataaataatggcgtcagaacgcctgtatctttgtcggttaaaggaaaactgacagttacaggaaatgatttttccaaagctgccgacaatgcttatttcaattgtatagaaaccggatataatgggatatatgaagttcaaaacggcagtgtgttttctgaaaacactttcggaaatatagctaacaacgctataagcatatactcagtttcagataacgcggttatatccatagtcaaaaacaactttaaaaattcagcaaatcctatacggcttggaaacacccgttatgaatatgttaacgccatttttgatttcaaatataataccagtgataccgggtcagattttataatactaaaagatgatggaacaacaaatgaaaaccacgaaatattttccgggtataaaattaatatcgcaaacctgaaaaacaataagacagggataatggcttcttctaataatccgagacaatattttgtaaaaaacaacggcgcagtaaatcaaacttctaatatgccggcagtgacatttaatattttgcctgagccggcctccgcatctccatcagctgtggagacgccgggattacagcctacaattattcccaccctgcctcctgcagaaacgaccacagcaccacctacgtcggaaccaactgctgctcctactttggatccaacagccgaaccaaccatggagccaacgcccgatccaacaaaaaccccgacagcagaaccgacgattgaaccgacagaagagccaacttttgtcccttccgctgaaccaacagcagctgcaagttctgaccctgaagcgacaaattcaccttcaacagaaccgggttcagaccctactgcaacaccaagttttgaccctgaagcttccataagtccgattccaactcctgaagcaaccgcaaacgtaccaacccaaacgccggaacctctttatcttgtttctataaatgctgatgaaaacatcacaaatgttaaacttataaataaagagacagcttccgaaacagaaatggttagagccacagatacagcggataaagtattatttactgcatctgtaccaaacggagcttatgatatttcagctatagcaattgaaggaaaagagcctgatttgaaaaacagtgacataagcttgaacgtgaacggctatgacatatccggaacggttgtcacacaagacgcaggcacaatagaccatatagaaatatcaactcctccgacaaaaacggaatatatcaacggagaaaaatttgaccctgccggattagttctcaatataataaatacagacggaacaagttcaaacgttgtatatgacgaaacaacaaaagacagtttcacattcaaaccggaattagacacggaaatacctgatattgacgtatattccggagacaggtttataaatatcatatacggaaacaggctggcaaaacaagaactgacatttattatgcgctatgcgtcagctgagataaaagctcctgcttcaaatcaaagagtaagctttgatgtcaagattccgggaaattcctattacacatcagaccaagcggaatgggacccaacagtatatccgggaagcaattttaactatggcaccgtttatactgccgctgtgaccctccacgctaacgatggatacactttctctaaagatgaaggcgcaatgacagcatatataaataacaagccagcagatatagttaatataagcgaagacggaaaatccatgactatctcacatcagttctataaaacttcggttatgggcggaggcaactcaggtcactccacaggaacaacacctacagccacgccgaaacctaaccttaatacttacgaccactttgcatatatagtcggatatcctgacggatatataagacctgaaagtaatatcaccagagatgaagtggcaactattttctttagactgcttactgataaatccagatctcagtattggtcacaagttaactattatgtagacgtcccggctgacttatggtcgaacaacgctatttccactcttacaaaagccggaattctcggtggtgacggcacagcgtattttaaacctacagcttatataaccagagctgaattcgcaacaattgccgcaagattcagcgatgtagtctacagcggaaccggaaagttcggcgacgttggcggacactggtcggagaattatgtaaatatcgcagctgaggaaggctggatacaaggatatgaagacggaacatttaaacctgaccagctcataacaagagccgaagctatgacgcttgtcaacaatgttttaaacagacatgtacgcacaagcggtcttcataaaaatatgaagacatgggcagataacaaagacaaaaatgaatggtattacactgctgttcaggaagctaccaatacccatgattatgaacgccctgccggttcaacttacgagacctggacatatataggacgtaatcccgactgggtgcagcttgaacagaaatggtcagacgctaacagcgccggaagtataaactgattattaaagattaagtaatatacaatatgccgtgtttcttaagaaacacggcatataacttattatattaatccagctttttagctttgaatcttgacaagatttcatcacggaagaaaaatgttatactccacaatgcgccgagacccacaagcgtataaattatcctgctgatgatgctggccgaaccgccaaacaaaaacgctaccaaatcaaactgaaaaataccgacaagtccccagtttaatcctccaataatgactaaaatcaatgcaataatatccatactatgtcctccataaattatttaattataaattcttttgatattatttccttataaacttatattattctaaaaacagttacattattacaacaactttgtttatcaaacacttttttataactgattattatattattatctaaaacgattaaaataataagccaaaagttaaaaattttaaatctgaaagaactattatattatttccaatcaaaaatattttattataaaactgttataaatataatcgttaaaatttttgtttattatattttttattttaagctctaattgaattaattatttatataaataaaatttgcgactgcgcacctaatgagtcagattacatctgccctgcagaagcttgcagaaaatattttttatatggttatatatttgtaaaaataaaaccctctgtaatttatgaactaattagaattaactatttaatataaataaaatttgtgactgcgcacctaacgaggcagatttcatctgcccttccgttgcttgcagaaaatattttttatatggttatatatttgtaaaaataaaaccatctgtaatttatgaactaattagaattaactatttaatataaataaaatttgtggctgcgcgcctaacgagacagattacatctgccctgccgaagcttgcagaaaatattttttatacgagtatatatatttgtaaaaataaaaccatctgtaatttaggaattaattgaattaattatttaatataaataaaatttgtggctgcgcgcctaacgcggcagatttcatctgccctgccgttgcttgctaatacatttttttatatgagtgtataatataagtaaaaataaaatcacttgtattttaggctctaattgaattaattatttatataaataaaatttgtgactgcgcgccttacgcggcagatttcatctgccctgctgaagcttgcaaatatcatttttaaagagtatattatacttataataattaaacaaattgcaataacgaaaaagacttgtaataataaaaatgcttatgatgctaaaagtatttgtgataattataatatttaaataatcataataagatataaaatttaaataattttatattcatatttactatctatatcaaaaaatgtttatcattcaattatttattaataataaggaaatataatattatttctttgaagtatctaaatgattatataataaatgatttatgcaagcaacggcagagcagatgtaatctgcctcgttaggcgcgcagtcgcaaattttatttatattaaataattaattctaattagttcctaaattacagatggttttatttttacaaatatatactcatataaaaaatattttctgcaagcaacggcagggcagatgaaatctgccgcgttaggcgcgcagtcgcaaattttatttatattaaataattaattctaattagttcctaaattacagatggttttatttttacaaatatatatactcatataaaaaatattttctgcaagcttcggcagggcagatgtaatctgcctcgttaggcgcgcagtagcaaattttatttatattaaataattaattctaattagttcctaaattacagatggttatatttttacaaatatatactcgtataaaaaatattttctgcaagcttcggcagggcagatgtaatctgcctcgttaggcgcgcagtcacaaattttatttatattaaatagttaattcaatttagacctttaatatatattaacgtcatcaataacaccacttgctatttataattttaaataaaacaatattattttctcatatcagaaagtaaatttataaaataagataaatatggcaatattaaatattaaaagaaattaaaatattttaaatgtatcaaaagatcacccctcagcgtcagcatcattcaaaccataatgcaatccaacatagcagatataataaataataaaatagtccaaccatatacagtatgtgtttaaaatattaacaaatatattactcatgacataatcaggccatttagcctttgctaatcagcaaaaataaatataacacaaatatataatatcctgaaaggagcaaaaagaatgaaagaatatttacagattgaaaaagttatagggagagaaatccttgactcacgcggcaatcctactgttgaagctgaggttcatcttgccgacggcactatcggccgcggaacagcgcctagcggcgcgtctaccggcgagtttgaagcgttagaacttcgtgatgacgataaagacaggtaccttggcaaaggcgttacaaaagctgttaaaaacattaatacgataataaatgaaaccatatcaggaatggatgcttcagatatttacgcaatagacaaagccatgatagccgcagacggcacaaaagacaaatcaaaactcggtgctaacgcaatcctagccgtatcaatagcagcatccagagcggcgtcaatttcacttgatatacctctttacaaattttggggcggaatttccggcaatgttctgcctgtaccgatgatgaatattttaaacggcggagcacatgccgctaatactgttgatgttcaggaatttatgataatgcctataggagcaaaaagttttaaagaagccctgcgctggtgtgctgaagtatttcatgccctagcgtcattactcaaatctaaaggtctaaccacatcagtgggtgatgagggtggatttgctcctaacctcgccagcgatgaggaagctattcagtatattctcgaagcagttaaagctgccggttatgaacccgaaaaagatttcatgattgcgatggacgcggctacaagcgaatggaaaggttcaaaacccggagaatatattcttccgaaagcaggaacaaaatttacttctgaagaattaatagcacactggaaaaaacttgtggaaaaatatcctattatttcaattgaagacgctcttgacgaggaagattgggaaggctggcagaagctgacgcaagaactcgggaacaaggttcagttagtaggagacgacctttttgttaccaacacagagcgtctaaaaaagggaatcgaccttgcatgtggaaactcaattcttattaagctcaaccaaataggttcagtatcagaaactttggaagcaataaaaatggctcataaagccggttacactgctatttcatcacatagatcaggcgagacagaagacacaacaattgcagatttggcggttgcccttaacacatgccaaatcaaaactggcgcgcccagccgttctgaaagagtggcaaaatataaccagctgattcgtattgaggaggaactcggtgattctgctatatatccgggactttcagcgtttaatataaaaaataagtaaaattatctgcccgcatagtacgggcaaatatacatataaagcatataataaatatatagaaaagtcaattgtattataattggatgtaatgaccgcatggcaaccagatacaaagatattttcaaatcatacaaatataaggctaaagtttttacgcagatgccgccctacttcgaaaataaggtaataaaacaggatttaatagtagtatttatcagtacatattcgcataaaatgattaacactgttaatcaaaaatctgcgaaacatacttcccgttcgttaaatctccgagtcctgttgtgacagctctaaaatcaattcttcagtaatactcgcgtaattatattttttcggccaatagttagcggaaactaactgccggccgaaactgtaatcctaaactatttatcttttatacttttacttgtagaatttgatttatttcatatatgttatagaacatcactagaaaataaattgaagaaacatatcgtattatatataaaataatataaataaatttttatatttcaaatttcaataactatatatttaaaccaaaatattttacctgaagataaagtttatcaaattacagtccatcataataaaaataatacattatttttattatgatccaaacgactgatgacaaaaaattttagtctatcaagcagaagataattatgctgaagttaaaaacttaagagctcaacttttcatttgagacagaaaatatttaccctttaatttaaagttataccatttttattaaaaactataattttcatcatattataaaattcccaaatgctatttgacatatagtaaattaaatgataaaatatataaaaaatatataaggatgatgaatatgaaaaagtttatgttattatttctatcaattttatctatatcttttatattgtcatttccagtttgcgctgaaagctatgaagatttaacatatgaaagaaatggttatggaattacgattaccggctgcaacaaagatgctgaagatatagttattccatccgagattaatggatcacctgttacaactataggtatggaggctttttacggcacgcacaatcttaacagtattattatacctgaaggcgtaactaagcttgactttaaagcttttgaaaactcagatgtaaaaaatgttaccttgccaagcacacttaagataataggaggtcaggcttttaattgttgttttgaccttacagaaataaatttaccatatggcttggaagttataggcggtcacgcttttgcaaactgtcaatcactaaaatatattgatattccggacagtgtatattttttaggtgaatatgcgtttagatattgtgaatcagcaacagagcttaaaatttccaacagtcttactgaacttaataactcttttcaaatctgttctagtctgagcagcataacaatacctgaaagcgttacatccataaaaggtgcatttttatgttgccaaggccttactgaaattgttattcctgaaaatgtaactattcttgatgaatatgcatttgaaagctgctccaatctagcttccgtaaatatcccaagcggaataaccaaaataggtagagattgtttttcagggtgcaagaatctcaaggaaatcaatataccgcttaatgtgaatactattgataaaggagctttttccggctgttcatctttaacaaatctgtatattccaccttcaatcacatcaattggtgattcggcgttttcatcctgtaccggtcttgagtctgttttggttcctgattcggtaacaactttaggaaaaaatgtattcagtggatgcacaggaattaaatctgcttcattgccaaattggttaacggaattggatggaacattcagcggatgcacatcgctaactgattttataatacctgagactgtaaccatcataggagggtttgcctttcataattgtgcgtctttggaaaatattataatacccaaaggagtaactgaaattgattcatatgcattttcaggatgttcttcactaaaacatatagatataccaaataatatagttaaaattgaagataacgcattttcaaactgctgcacactaaaagactttgttgtcccaaacgggattacagaaataaaatcatatacttttgaaaattgttcagaactagaaagcatatcattgccgaacagtttgatatcaataggaaataatgcttttaactgctgttcttccttaaaaagtattgaaataccggatactgtatctaatattgatgggtatgttttcaacggatgcacagcacttgaaaatattaatttacctccaaatataaaaaaaataagcggcaacatgttttctgaatgcagcagtcttaaaaatattataataaatgataatataattgaaattgaaaactgcgcatttagcaactgcactaatttagaatcaatccaattgcctgatagtttaacttcaatctcatatagtgctttcagcggttgcagttcccttataaaaattacaattccagataatataaaagaacttaggagtgacgcatttagcgactgtgttagtcttgtggaagtcaacttgccgcaaagtcttgaaaaaatcggttcatatatgtttaaaaattgcagctcccttataaaaattacaattccaaataatgtaaaagaacttgagaatggcatatttagcgactgtagcagccttgaggaagttagcttgcctcagggtcttaaagaaatcagctcatatatgtttgaaaattgcagctcccttactgaaatcattattcctaaagacgtagaatcaatatggtatcaagtatttaaaaattgtacttctctgaaaagtgttactttaaatgatggattaatgtatatatatgatgaagcattcggaaactgctcaagtttatcagatattgaacttcctgaaagtattcagaaagtatcaagcacaatttttttgaactgtgacagaataggaaatatgtatgaccattttgctgctttaaataatattaaaagaaaaatggtattaacaattgacaaaggtacggcaaaagttggaaatatagacatatgtctaggttcggcgccgcagatagtaaacaacagaactatgttacctgcacggcctgttgcagattttatcggcgctaaaactgattggagtgaactggatgagactgttacaattcactctaataacaataacataaaattaaaactcggctctaatattgcatatgtcaacaataaagctcaaacacttgattcaccgccatacctatataaagaccgcacatttgttccattgagatttcttgttgaaaacttggacgcacaaatcacttgggacgaggaaagtcaaactgtgacaattgaatagtatttctgacctcgaaactttctgtattcgaggtcagattgtttttataaaaaattgtataatagactatattataaatatactcgcttcacaaaacatatataaaaaattaatataaaacgcgctgtgattatcacagcgcgtaaaattaatgttgagttaattttaatatctaatcaattagattatttcatcattgaagcaacttcttcagcgaagttatcctgcttcttttccattccttcacccttttcaaaacgagcgaattttgcaatcttaatttctgttccaagtgtatttgcaacgccgtcaacatacttttgaacactcatgtcggggtccttaacatatgcctggtctacaaggcaaacttccttatagtacttctttatacggcctgcaaccatcttgtcaacaattgcttcaggctttccttcattcagagcctgttgtttcaaaatctctgcttccttctccactacctcagtcggaacagtttcctctgttaaatattcaggagcagcggcagctatctgcatagccacattcttagccatctcaacaaactcaggtgtttcagcctttgaagcgtctgatacttcaaaattaacaagaacgccgattcttccgccggcatgaacatatgactggttaactcccttatatgtctcaaaacggcgaatattcatattctcgccgatagtagcaatcttttcggtcaaagcgtcgccaactgtctggcttccgccgtcaattgtcaaagtcttaagctcttcaacatcagcaggagcattattagcaattgtcttagctatatcttcaacaaacttctggaaatcagcattctttgcaacaaagtcagtttcagagttaacctcaacaacaacgcctgtgtctccataaacaaacgaaccaaccataccttctgcagcgattctgcctgcctttttggcagcttttgaaagacctttttctcttaaatattcaatagccttttcctgatcgccgtctgtttcagtaagagctttcttgcagtccatcattccgcagcctgtcatctctcttaatgtttttacatcttgtgctgtaaatgccatttttattcttcctttcgtaaaaaacttcttattatattattcgtcaagaacgtctagagtaacctcttcgttctgagtttcctccatctgctcgccctgcttgccttcaaggatagcgtttccgattgtagaaacaataagcttaacggcacggatagcatcgtcattgccggggataggataatcagcttcttcagggtcacagttagtatcaacgatagcgattaccgggataccaagcttgtgagcttcagctatagcattcttttcttttcttgggtcaacaacaaacatagctgacggtaagtcctgcatgtttttgataccgccgaggaacttttcaagtctttctttctcaagatttagcttgataacttccttcttaggaagaagttccatagttccgtcctcagccatcttgtcaagctggaacaatctgctgattctctttttaatagtcttaaagtttgtgagcataccgccgagccatcttgcatttacatagtacatgcctgttctctcagcttcctctttgattgcttcctgagcctgcttctttgttccaacaaaaagaacacttccgccctctgcagcaacatcacgggtaaagtaatatgcttcctcaatcatcttaactgtcttctgaagatcaatgatataaataccatttctctcagtgaaaatgtactcggccattttagggttccaacggcgagtttgatgtccgaaatgaacacctgcttccaataactgcttcatttgtactactcccatattttacacctccataaagttatacctccgccttgctcagctttcataagaaccggaatgggaataccggcacatcaaatgaaatcacaaaacgtgtgtattttatataatttggacaaacttagcccaaacaccgaaatagtatatcataaccaaattataaatgcaagacttttttctatattttttcaaaaaattatatatgtaaattgcaatatcaaataggacatttataaaaaccagtaaacacctcattagatatatgataattgatcatttttctagcagctcattaaacaagtatcatctttattgtttctataaaactataaaaaaggccgaaatcattgcacagaaatgtcaatgtcatttattataaaaattttataaaaaatgttcttttactagcttcagcaggactttgtctacacctgtaagataggtgcacaccttcaaataatcattaaaacaacatataaaaaatatttctaaataaattataaaaagtgtggttttgtaagcttcggtaggacgtacgaagtacgtcgcgtaaggcgcgcagtcgtggaacagtttattataaaacggattatgacaaactgttctatgtatatttacgctccgcgtaagatgacagctcacctgaagcggcgcataaatgcgcaatacatcacaactaagtcatattattgacattgaaggtttaaggaataaagagatatttgggctcacacccaccatttaggtggggtcacagtcacacctccagatgttcactaaaaacactctgtatacagaataataattctaaaataaattattatatgaaatatggttttgcaagtatcggagggctgtgaataactttttcattataacactgaatataaaactgaaaattctgcaataatgtttttccataaaatactatggagtattctaaaattataataagaaaatataaaaatccgcctacaattgtataggcggatttaaataaattgctattttaccaaattgatactctgttctcaggagcaacgtacattccatcttcttcagttatgtcaaaagcttcgtaaaactcatcaaataatgcagcaagcctattcgctctgacaatcccaaaagaatgaacatctattgtgctcagactctctaaatactggcgctgacctgttatcttccaaagcttagcattactttcaaaaaacagtttataatcaggattttcgagttttttcatggcgtcaagcgcacatgccattcctccaatatcagctacgttctcgcttattgtaagttcgccgtctgtttggattccgggagcggattcaaatccgttataatagttaacaacatcctggcaaagctgttcaaacacagctaaatcctcttcagtccaccaatttgcagcgtttccaaactcatcaaattttgcgccgttattatcaaaagcatgtgtaatctcatgcgctattactgtaccgatagaccccaaattttcctcaggctttccatcagaataataaaacggctcctgaagtattccggccgggaagttaatagagttatcagtttgcatatatccggcatttacggtatataccggaactacgctccaataatctgctttttctgcaggctttccctggctttcagctatatcagcatacgcggattttcttatactgttcatagtattaaaatatgcgtatttttcatttggagaataaaccgttatatcgtcaatataatcctcaaatgattcaggataaccaacgttaacagacattgcgtcaatttttcttattgctttctcttttgtggcttcacccatccaggttagatttgcaatcctgtttctgaaaatatctataaactcatttaccatattttcaacatcttttttagtctcatcagaaaaatttcgttttatatattcttcactcaaatatgaagataaagtatttttggtagtagtcaaagctatatcctcagcaggacttgtaacgtccattccaaaataatccgactcaaaatcattcgctgcgtcaataaaacgtttatccagctgagaacccaaacttaaaacagaaattttaagtattgttttcaataaatcaatgtttttgtcattaacatatgaagcaaacgcttccataacctttggagttgtgactaaaacattatcttccggatgaagacctaatgcttccaaaagcttatcaaaatcaaatgcagggaacaaatcacacagctctgaataactataaagattataaatattatctatattagaagcttcttggtttgacattacatattgagataaatccttttcaaaagcgataaacttctcaacatcttctgcagctttagtgttgtcttcgccgccgagaaccaagatatttgtcaagtaatctttatagctgttcataatatcttcattttcatagtctgctttggtacggctcggcgaatacgtcccaaaagcaaggatgttttttgtgttatctttaaaatcagcgacaatcgcaaaagctgcaaacgtggtaactaaataatcttttacaatctttgttgacaaagcgtctaactcgtcaagcgattctattttatcaatttcatcaagatacggctttagcggttcaatatcctgttcagttccctcgccggtgtttaagtttttaacactggtatagaaatcagctattatctcaccattgctgccggcaggctgttcttctgacaaataattgttaataatatctgagattatttcatcatttctctcgtcaacttcatgaaacgatgaagttactacattgccttgagaaatttctgcagtgttataataatctttgttgatataagcctgaaagtcatcctttagattagatccaaaaagataatataacctgcggataatcaaagtaacctcgtcctcggttataaaatcctcagaaccgagcaatccatcaccttttccaaccagtatcccgcggcttgccaaattattaacagcgtcttcagcccagtcaggaacatcagaaaatgttaaatcagtttcgctgatacgtttaaagttcttatcaggttcaggcatttttccaaaagcacggtcggccataacaacagcctcggaacgcgtaatatactggtcgtcttttgtgtcaccgtcgccatatccttttataatgtctcctctggttattcctgcattataatcatccgaaacagacaaaagcttatcggcaacatatccccttgttgcataacctgcgccgtcttcttctgcaatgacaataaacggcattgtacttataagcatagatagagccagcattaaagatagcagttttttcttcattttctcacctcgtattataatattttttgttttttcatttttaattataccattggcaagtttttgtgtcaatcaaattagttaccgataaatatatatgtattatttcttttaacataaaagattaattattttaagcggttgaaaactaaaaccgtaccagcttaaaaattcggtcacaatttaagtataaatattattaactatgtttatataatcaaaacgcatattttataaaagtaaaattttacttaaaaatctattggcacggaattatgacataagctatcaagctctgagaaaagacaggtaacctcgtataataaattcaagttgtctgcataaaaacagcgcagcagtcataaaactgctacgctttaagaatctcttttttagtggttacaccattgtctttttgtatatcttaaattttaaacaactttttataatatttattaaattctaacaaaatataattttaaataatagtatttactttatttaaaaagctttttctaacctgtatttttataaataatacttttatttattcagttcttgtgaaagtagcttatttaccactccagggtcaccttttccctttaactctttcatgcactgacccatcaaaaatcctatagctttcttgtttcctgaattataatcggcaacaggctgaggattattttcaataaccttcttaactatatcaagaaccaatccttcgtcgcttacctgctcaagattattatctttaacatatttttctacatccaaatcttcattgaaagcgattccgaaaatttctttggctttgttacggttgattgttttcttatcaaccagctctatcagcttggcaagagctttggacgtgagcttcatatccttggcttctataccctcatcgctcagttttctcattagctcgcccataatccagtttgaaacttctttagggttattgcatatcgccgttgtctcctcaaagaagtcagccagcgctttctgacctgttatcatgttagcatcatattccggcaggccaaagtctttgatataacgcgcctttttctcaggagcaagctccggcaaactgctttcaatagaattaaaccactcgtcgtctatatcaataggcggaatatccggctcaggaaaatatctgtaatcctgtgcgttttctttgcttctcatagcatagctcttgtctttattatcatcccagcgccttgtctcctgtacgacctttccgccgcgctccaataagtctatctgtcgtttagcttcaaaagctatagcttttgaaatagctttaaacgagttaagatttttcatttctgtccttgttccgaattcttcctcgccgacttttctgactgacaggttgacatcggcacgcattgacccctcctgcatcttacagtccgaaactccaaggtattccagagtggatttcagcttagacagatatgcgataacctcgtcagcgcttctgaaatccggctcgcttactatttcgataagcggaacgccgcatctgttgtaatcacacttagtttcgtcgttaaactcatcatgtatcagttttccggcgtcctcttccatgtgaatttcatgaatccttatatcctttttaactccgctttctgtctcgataggaactcgtccattccgacagataggcagatacagctgggatatctgatacgccttaggcaggtcaggataaaaataattctttctgtcaaatttattgtatcgggtaatatcacaattcagcgctattcccgccttcatagcaaaatttactacctgtttattaacaaccggcaaagtacccggcattcctgtgcatatagggcagcagtgagtgtttggctctccgccgaattcggttgtgcatgaacagaatatttttgatttggtcgcaagctcaacatgaacttcaagacccattacggtttcccatgccatattacttcgcctcctttacaaaactatccggtgactttttgtgaaagtctgttaaactctgataagtatatgccgcattcagaattacatcgtctttaagcggtgcgccgaccagctgcgcgcctatcggcataccatcttcatcaaatccgcacggcacgctgattccgggaagcccggcaaggttaacagaaacggtataaatgtccgaaagatacatctttagagggtctgataaacttgaacccaatttaggagcagtagtcggagcggcagggaaaagtataacgtcatatttcttatacgcttcgtcaaatgcttgttttataagggctttaacctgcagagcttttttgtagtacgcatcataataccctgtagacaaggcaaacgttccgagaagtattcttctcttcacttcttcgccgaatccctcgcttcttgttgacatatacaaatctgttaaatcatcaaaattttcagatctgaatccatacttaacgccgtcaaaccttgaaagatttgagcttgcctcagcagacgctataatataataggtcggaacaacataatcaataatagtcatgtcaaactcttcaacagaagcgccgttttccttcaaagtctcggcaacagccaaaactgactttttcacatctttattcagaccgtctccaaaacactgcttaggtattccaattctcaaaccgtcaacattgccggacagcgagttaagataccctttatgttcaacctccaaagaagttccgtccatctcgtcttttccgcagataacatccataatagcggcacagtcggcagcgtccttagcaacaggaccaatttggtcaagtgaagaggcgtaagctataaggccatatctggaaacagctccataggtaggcttcattccggtaacgccgcagaatgacgccggctgtctgatacttcctcccgtatctgagcccaatgcgtatggagcttcctttgctgaaacagctgcagccgctccgcctgatgaacctcctggaaccttttcagtatcccacgggttttttgtcggcccataaaacgatgtttcagatgtgctgcccatagcaaactcatccatgttcagctttccgatgataacggcgccggccttgttcaatttatcaattacagcagcattatacggcggcttaaaatctcccagtatttttgaagcacagcttgtctttattccctttgtggaaatattatcctttattccgaccggaactcctgccagcggagaatcgctgagctcgcctgagtctatcattttctgaacttcttcagccctctccaaagcttcctgttccgtaactgtgatatacgcgttaacaaccccgtcttttgccttgatttcatcaaggaacgccctggttgcttcaacgactgtaatatcaccgctctttatctttttgcccagctcaagggcagtataatcagtaatattcatttatccgtttcctttccaaaataaatttctcaaacgtgatggctattccaccgtctttggaacgatgatagcctcgtcgtcagactttggagcgttagccaaaagctcttttctgtcggcgctttgcttaacaacgtcctcacgcataacattttttacggcaaacgcatgtgacataggctcgacgccttcagtgtcaatattattcaaaacgtccatatagcctataatctcgccaagaccctgcctggcattttcaatctgctcatcattcagttttaatctggaaagttccgccacatacgaaaccatatcttttgttacttccataatatcactcttttcgctataaagttgattacatattagtggtaattataccaaaccataaaatttttgtcaataacttactatatataatcattgacaattcaaacacagacaaaaccaataaatataatgttattaatatgaaaaaataattttgtgctaaactactctgcagcatattttgaaatattttagcattattttcactgacatttttattaaaaaatattccattattttattataaaaccgtaacaaacgttttattctcgttgacaagactatgtttttctattataatattataatcattttaatattttatggattttcttccaaatagtaaatttttttgaaacggagattgatttatgggcattttcagcatgaaaaactataataaacccggtaagggtgtggaccctctcgaacccaagagcgagggcgctgttttattttttgaaatattcatccgaaagttctggaagttcatacaggtcaatttgcttttttgcctggcaaatatcccaacctttttaatcgtgttttttctttcaggtacagtttcaaacgcggtatacggaacgttctcaaaccaaattgccagtatggtcggactgagcgctcctgatttcagcaacagcgatttcagcgctatgtacataaccatagacctaggaatcagagcttttgttactatactatttacagttttttggggtatgggacctgtaagcgcaggtatgcactatatccttagaaattactctcgtgaagaaaactcttttatattaagtgacttttgggacgcaataaaagacaattttaaacagtctttggctgtttatataattgatttgatagcgcttttcgttttcttctacggtataaccttctactcgtctcaaaccaatttcctgaaatacggaaaatacctggtttattgcttgttccttttctacgcaatggttcatctgttcttgtatccgcttatggtgagatataagctgactatcggaaaactttacagaaatgccgcgctgttttgcttggtcagcctgccgtacagtattcttgttatagtattgcttcttttgatgacagtaggcgttggttatttaggaatatttatgctgtcaagcggttcatttacagtgcttttcacaatataccttatatttgccgtgctgctgctatattctttcacagggttcatcgtcagctataatgcggaatgccaaataagaaagcatattgacgaaaacgcagacgtagataaaaaaccgaattatgaaaaagaagaaaaaccgtcaggaagaagattatattagatttttcaagtaattttaagtaaatacagagagcttttatagtttatgaattatttttatcgttcttaactattttaggctcttttttattgcccattattaataaaatgttcaaacatactacaaaaatagttaaaaaacatcatatataattttatctaaaagctactcatggaggataatatgaaaaacattttagaattacttgaaaactcagaaaagctttatcctgacaaaacagcagtatcagacggcaaaagaactattacttacagcaggtttaaaacagcagccatggaaacaggctcatatatagcctccaattttaaattcaaacgccgtcctatcgccatatatatggaaaaaagtattgaaacgcttatttcaatgatgggaacagtctacagcggtaatttttatgtaatactggatataaaaatgccggcggaacggttaagccttataaccaacaatcttgaacctgaactaataataacagacggttcgcacctttcaaaatctaaagaaatattccctgaaaccaaaataatctctattgacgccgttcctcataacataaacaacagcctgctctccgaaatcagaaataaaactatagataccgacttgctctacgtgctgtatacctcaggttcaacaggaatacctaaaggggttgccgtcagccataaaaatgttatatcctacagcaaatgggtaatagatacttttaatataaacaatgaaaccgttttcggaaaccaaactccgttttatttcagtatgtcggttcttgatatttacgcgtcgcttaggacaggcgccgaactttgcattattcctcaaagtctcttttcgtttccgcttgagctgttaaagtttattgacgaaaacaaaatcaacactatttattgggttccctctgcgctggctttggttgcaaattggaaagcatttgactactgcgttccaaaaacattaaaaaaggttctcttcgccggagagacaatgcctatgaaacaactgaatgtttggcgcaaacatcttccgggcgtattgtttgccaatcttttcgggccgacagaagttacggatatatgcgcctactatatattagacagaagttttcaagacgatgaatcactgccgattggtaagccctgcgacaattgcgcgctggaacttataccggctgaaggcgataatacacaaacagaactttgtgtaagaggttctattgttgccatggggtattacaataacccgaaaaaaactgccgaggtgtttgtacaaaatccaaacaacacatgctatcctgaaattatatataaaaccggcgacttagtagaactgaacgataatggcgagttaatatacctaggcagaaaagaccatcaaattaagcatatgggataccgtattgagcttggagaaatagaaaacgcaattaattcaattccgaatgttcaggcttcctcctgcatatatgatgaagagcaggacaaaatagccgcttttcttcaaactgattctgaaattaaagagattaaaaaaattgtaaaagaaaaactgcccaaatacatgatacctgcaaagtgggtgtttctaaataaaatgttttacaattcaaacggaaaaattgacagaaacaaattaaaaaacctatatataaaaggagaggtataaaatgaatgaactgattgaaattttaagcggcatttgcagcggggaaggctttgagaactcagaggaccttatagccgatggttttttggattctttagatatagttcaggtatcggccgaactggaaaacaattttgatattgaaataactcctgttgacgtcacccatgacaactttaaatctgtaaacagcatttatgaaatgataaaaagactggaacaagaataagaaaagagagatcatatgcaatacaatatgcctatttatctatgcgtgtttcttccggctgttttgggcggatattatctgacaccaaaaaaataccgctgggcggttctattattggcaagctttgcgttttatttaataacgggcggagcgcttatagtattcattcttgcgtcttcactctttatatatgctgcaggactttggcttgagagaataaaccaaaaatacgccggtatcattgcagattcagataaaacacaaagaaaagcaataaaacagaaaatgaaccgtgagaaaaagattgtcacaggaatatcggcttctatacttataggagttctgattttcttgaaatacttcaactttttcggctccaatataaacggactgataaataatctgtttggtctaacccctattcctacgctttccctaatgctgcccctaggtatatcattttacactcttcaggcagtcagctatataacagacgtttacagaggcactgtcaaggctgataaaaacctattcagagtttgtttgttcttaacgtttttcccccagctaattgagggaccgatttgcagatacagtcagactgccgaaagtttgtacaacggaaacgactatgattccaaaaacatagtttccggattccagctgataatttggggtctgtttaaaaaaataataatagccgacagactcaacgtgctggttaatcaagtgttttctaattattcaaattacggcggagctataatagctatatcagtgctatgctatacaattcagctctactgcgatttttcaggctgtatggatattgtgcgcggttcgggagaactgtttggaattataatacctaagaattttgaacgcccgtttttttccggcagtgtttccgagttctggagaaggtggcatatctcgctgggaacatggtttaaagactatttattctaccctgtttctctgtcgtctcctgtcaagaaacttggcaagttttcaagaaaccatttcggcaaccgtgccggaaaacttataccggcagtctgcgctttatttctcgtttggttcagcaccggtctgtggcacggcgccagctggaaatacgctgcatacggactgtattattttatccttataagcttgggaatggttttagaaccggaaattaataaaataaaaaacagcctgaatataaaaaaagaaagcaaactatataaagcatttcaaattttcagaacttttgtcctggtcaattttggaatgctgatattcagggcagataatcttcaagtctgtataaatatgtttacaaaactatttacagactttaatccggctcaggttttgagtttctttagcattaatctaaaagttgatattaacgatataattatattaatcatatcctgcacagttctgctgactatggaaattttaagagagcgcggactggatattagaaaaaaactgtccgaaaaaccaacggctgcacgctgggcggtttattatgcctgtgtgctggcaatcataattttcggcgcgtatggctggggatattcaccctctgcgctgatgtacgcctcatattaaaacgactggagaaataaaatgaaatggtttagacgtatactatttgccttaatcctcattatactgctttgtcttgccgcatacgtggtgtctccaaaaagcaatgccggtgaaatgggaatccatttaacagacgcagacgatatatatgctgagtgtaaaaacaccttagatattttcgcagttggaaacagcaacctttttgccgcaatgacgcccatgcagctatgggaagactatggctatacctcatatgcggcgggtgaatccaatcaaatgatttaccgctcatattttctgctgaaatcattgatagacaaacataaacctaaactgtgtattttagaaacggacgttgtttttcaataccgttcgaccgcaagcgacctgcaaagtataataagcgaatacataagtgaggattttccgctgtttgaatatcacaaccgatggaaaaaactcaccgaaagggatttcacaacagtaccctcccataaccgccccaatgttttaaaaggttacgagtacatcacttattccaatccatacaccgggggagaatatatgaatgaaacagaaaatattgaatcctttcataaaatacaaaagttctttttagacaaaataacagagttatgcaaagaaaatgatattgagcttttattgattgacgtgccgtcctctaaaagctggagttatgaaaaacataacgcaatacaagattatgcggatgaaaacggcttaaaattcatagactttaacataaacaaagacagttttggcatagactggaacaccgacacccgggacggcggctggcatatgaaccacagcggcgcagtaaaagttacggaatacttagggaaatttttagatgagaactatcatctgcccgaccacaggggagaaaacggatttgagcaatgggcaaacgatcttgcagaatataaaaaaacaataggtgaatagtttatttattatataatatttgtaagttaagctcataaatattatataaaataaaaacaaatattaataatataaaaccataaaaatacggattgacaaaaatattgtcaatccgtttatttttaaattttatctcagccggaatataacaaaccaatcccatcccgatttaaggattaatacgtccaatatccctcgggaatgcggtaaccgtccttatattatccactcccagcagcttcatcgccagtctctcaagacctatacccaatccaccgtgaggcggcataccatacttatgcatcattaaaaagtctgagaactcttcagggttcattcctctggacttaattttgtcaagctgcatttgataatcatgtatcctctgtccgcctgtggttacctcggctccattcaaaagcaggtcaaaacttaacgtatattttggattttcagggtcgtccatagcatagaaaggacgctttttggaagggtaatgagtaacaaaaaccagcggcgagccatatgtttccattacatactcacctatcagacgttcttcctccggttccaaatcattagggtttctaaattccctattatatttttcagcaatgatctcttttatctccataaatttaaactgcggaatgtcaggaatttcaggaagctccactccaagctccttaagctccggagagtaattcgtcttaagatagtcaaacatatacttcataaaccttgcttcaacagccataatatcttcaaacgagtcaataaatcccatttcaaaatcaagaccctcaaattcatttatatgtcttgatgtgctgtgcttctcagctctgaaaacaggcgctacggtatatactttcttaaacactccaaccatcatttgtttatacatctgtgggctctgattgagcaatgctttttcaccgaaatagtcaacctcaaacatatcggctccgccttccgctcctgcggaaacgattttaggcggaacaaactcagtaaatccctctccgtgcataaatgacctaaaggcgtttatgataccgtcaactattttgagcgcggcgcgttcgcggggatttctcagtgacaacggtctgtaatccagctttatgtccacattgcagtccagtttcttcttatttataacaataggcatattttcggcaggagatgacaaaacctctatactattgatatgaatctcaaaaccaagcgcgctcctgtcgtcctttttaatcgttccagtcagccttacgctgtcctcttctttaaagtccgcaatcggcttatcactgtctgacggttcataaacacactgaaccaaatttctctgtgttctcaaaacaaaaaacgcaaagcttttcatagcgcggatacggtgaatcattccctctatttcaacggtatccccgtccttaacggttcctttttcaaatccgtcaataacggtctcaatatcatattttccagtgtaacggctcaaatcaatcatttccataaaatataaccctttctattcctaaaaatatcctttgtattctatcatacaatattttctatgtcaagcccgtataataccgtatcatcttggaatatccccttatgttctactccttataaaactgttgcggctatctacattttgtgctataattactatattaatacattatttattattgaaatttggataaattttacttatttctacatttgggggaaaactatgatatacatagattttgacagagacagctccgaaccgctgtatatacaggcgttcaaccagcttgccaaaaaaattaaccacaacgaaattaagggagggacgcgtcttccctcaagcagacaaatgtctaagcagatgaacgtctcggttaacactatcacaaacgcctataatctccttgtccaatacggatatatatcatctgaagagcgatccggatactatgttaacgatataacaaaaactgatgaaaatgtgcccgagcgcaaatggcacagcgacgctccgtacacttataacttcagcaggaacggttccgacctttcggttccggcaagcctaaaaaaatcatataaatactgtctcaagaattttattgaggacgcattctcctatcccgactatacaggaacatatgatttaagaaaacaaataagccttatgctcaacaaaaccctggatataaactgcagccctcttcaggttatagtaggctcgggtcttgaaaccctactcgactctctgtttcgtataatgggaaatgatatggtgtttggtcttgaaaacccggcttattatagaatagccagctatatgagactgggtggacgccggctgtcatatctcaacatagagacagacggacctacacaaaaatcgttaaacaattttaacgctgatattttatttttaatgccgtttcatcattatccaatgtattatacaatgtcaaaagagcagaaacggatgattctcgattgggcaggaaaagacagatacataatcgagtatggttacgacatggattttgtatataaaaatcagtcaaaaccgctcttttcgatgagccaaaataaaaacgtgatttttgccggagactttcagcggagcatagcacccaacatcagcacagcttacttaatcctgccggaacatcttgtcaatctttggcagaaagaatattatacctatcattcttacgtctcaaaagccgagcaagagtttatagccgagataattaaaaacggaagttattataccaacctaaaacggctcagaaaacaatatcaaaacaaacaggaacatttagtttcctgcctttgcaaacacccgctgggtcaaaaaatagaaataaaaaacacggacgcaggcaccacaatattaatggtgccaaagcccgatatatccgaggagaatttgattgtctcagctcataaaaaaggggtaaagttgtcctatataaaaaatgcactggaacaggaaaacccgaaagttcctcttaaaacatttattcttggatttggagagctttcaataccagaaatagaggcgggcgcaaaactgctgatggacacatggacgccgctcttaaacggttctttataacccaaaccatttttgaattgacttcataaccccgttctcatcattggacggggctatatgtttagccgcctttttcaaatcttcatgcgcatttgccatcgcaaaactttcaccgcattcaaacatcatctcgtaatcattcagatagtctccaaaacacatgcattcggacttatcccagccgcatatttcacgaacctttttaatcgcagagccttttgatactccaatcttcatcacatcaacccattctctgccggacaggattatctgagcagattcagggtattcagggagctttttataaatattctcatatgcgtcgtttggagtatatactgcaaccttcagtatattctttgtatcacaataatcagtaaggtcgggcacaaattccagtctcctaaaatactgaccgacctcaacaggcttataaccgccgacagaactttccatatacgcgcagtcttcacagcacaatatggggtaaacactcggcaattttctcgttctttttataacatccaaagcaacggctcccgaaagacagtcacggacgattacctcaccatccttaatgacaaacgcgccgttttcggctatatacataaaatttctgctgataggctcaaactgttcaagaaccttataatactgtcttccgctggccggggcaaaggttactccaattttattcaggcgttcaactgtcgcacgcaaatcccgaggaagctctttggatgaattaagtaaagtcccgtcaaggtcgcaggcaataaactttatcatatatcacacactccgagtttgtttattttcatcaatagtatatccctataacacgtttataccacagcggttatcatgctgtcaagaaaataacttctgaaaataaactacccggaacagatttttttgtatgttttattttcgttataactctttaatccactattccctcgcccagctttgaaatagcctttttctctatcctggaaatataagacctggatattccgagcattttggcaatctcgcgctgagtgagacattttccatctatcagtccatatctcagagtgattatcttgcgttctctcggcgtaaggttatatttaatgtttttatataaagtctttattctgtcgcccgactgtatctcttcaaaaatatcctcgtcgtcattttctataacgtccataagcataatggcgttgccctctttatcagtaccgatagagtcgttgagcgacacgtcattttggttctttttcctgcttcttaacatcataagtatctcatttgctatactaacgctgcggctatgaaaaagtttaaaacatcaatctaatcttattcaatttaagtatatactacactatcacagttcgtttatgttaaaaaagtaatattttttaataactgcacctctaaataagtcaatatattaacctaaattatcaaaatcactacaataaacgtgaattaattttcttaaacacttaaataaatgggaaaaacttacattatataatctactcgatttcttagattattttttttcaattaaatttctaaatacagttcttcttctcgaattagatttatttataaaatccactgaattgtaccaatttattaaatactcttttatcatattatcaacttttaatccattaaatacaaaaaatccaatcaaataatttatataatcaattcttaccggttgttttaaatcattgttttctataaaatctaaaacataatctaatgcatttaatgttatattaaaacactcttgtaattccgatgctttaagattacataattgattttccttagtatctgatggtataggagcataattgttagcatgaggacgctgtgttattttttcataagctggatttaatgcagctatagggtatgatacacatgttttctgaggaatgaaaaaatcttcatatccagcctctgcaagtttatttctaaatggatttgtatattgtttatatatatcaattccgtgtacctttaattttgaaaatctcatttgaataatactaaccctacttccagcattatttagtacttcaaaccattcaatttgttcatcttcagataaatcctcagccgaattaatcgtataattataattttttattttactctttacttgtaaaagtaaatttgtcacatatggttcttttaatctacgatctttagaaatataattaaatagttcattatccactttattaagaagtattcctactggaatttgattatttcgtatttctccttgtacttgagtaaaaactccttttccgagatctaaaacaatatttctaaaatcctcatgatttatgtaagctttaaaattagtagttaaacgctgctgtccatcaactacagaatattgaccacgctcaacatttggaaataattcacgattcaaaaaagatacttgtggaacaaaatcattcgtatctaaaattacattaaatgaaataggtgatacaggcgcctttcctaataattgataatttaaaagagatgtgcatttttgtaatgtccaactcaaatcacgttgataaagtggcaaagaaatcgtttgttcctcaattttttgacacatatcccaaattgacatttgatgactttttttagttggattaaacgctgctgctacttccaaattcttatttatacgcatattaatcgctccattcactcagctgctaaatttagcagctttattatattaatataatagcattaaaattttcatatgtcaataacaactaattttaattctatataatttcgccttttctaacttaacaatactatcaataaaaaacttaatttactagcaatacaaatttgtatattatccttgacacttatatgttttctcattattttattttgtataaaagaatagattataatcaacatatatcataccacattatattctataaaacaacttatttaataatggcaacaccatactattataacaaaaagttatttcgtaaatttactgcttaatcctatttaggcatattcaacagcatatacaaaaagcatattggtataaatataaattccttattattttcactcgcttgataccatttctaataaattatatattctctgtaatttcttataatatcaagcttatgtttttcttttttattaattggagtaatcgacaaaatacttgctatactaacgctgcggctctgaaaatatcggataaagtacaagcacatcagcatatattattagaaagtttaaaaaactatccgattttagcggatataatttaatccgtcatttcaaacgcaaaaaattttgctttataattatattttaggagtgatttttatgaacataattgttcatactccaaaagataagactgaaaaagaagcacttatgaaacgcgtcgccgccgcgcacgcagaatatattttaaaatatattgaaaaactcgacatttcagctgaacagaaatcagatttagtagatataataataagatgtaataattaaatatgatattcggataccgtttaatttcggtatccgaaatttttgttcatattcgtaatgaaaataaaaaatacttatttttcatctttcttacatatttttttaattaagtttatattttattgctttacataatatttccattatgatataattttattaaagtagttactaataaactatcttggaaaaatttaagaagatacttttttagctgcccaatttatattaattcaattaaaaaaacaaattaagggaggtaaagttatggaaaaagaaaaaacgttgtacggaggttctataaaacgcatactggcgctgatactgtgttttacaatgctggctggctgcttgcctatgctggcatttgccgaggaagaaaccgcacagggctcatccatgcttgagtgtgtatatcctgaagatgatgacaatatgttttcattcgccacccaaagcagcgctgtggatgaaggcggaaaatacataattactattgtcagaagcggagcggctgaagataccgcctcggttgatttaaaaacagtcgatgtctcggcttcatacggtaaagattatataatatctgacggcaggtatactacagaaaccactgaaaccaacggtaccattctgaaacaagtcacagattatgacgagcagacaaagcgccgggaagaatttgaatcggacctcagcgatcttaaatctgtaaccgactctcaagatgaagaaaccaatgaacccggcgctgaagaaccgatcaccgaatcacttaacaaatcggagacaaacataacaaataacggcgaaacggtgacagacagtgacaaaagcgagcttgcccgtcttaaagaagaacaaaccgggcagcctacaagagaaacatcctctaccgacttcactcctatgcaggagctgtttatgcaaagctctgtagacgagttcggaaactcgctggaaacttccagtatcacaaagatagaattcgctccgtctgaaactgaaaagcaggttattatagaaattttagatgattctgaatcggaaggcaatgaaatctttgacctgatactcagcaaccccggcgaaagttatggaattggtacagcggtgaattgttctcttaccataaacgacgatgagcctgtacagcattctgccattagcttctcggaagctgaattcattcctgacggttcaaacgctaagataacagtaacacgtaccggcgctgaatattctttctgtactgtcaaagtcagaaccgctgacggcaataacggatttgaaggcaaggattatgccaaagtggacgccgaactgacttttgagccttactctaacgaatatatatttgatattccaatcaatccggggaatgaggaaaaagaattcaatttagaactttatgattttaaaggcgcagacgaaggcgatataatacagagtaaagtcaaaatatcaaaagcaggcgaaagaccagaaacagaaaacactgaagctgcgcttgcatcagacgacgaggccacacttgcctcagacgatgaaaaatcatttgaaataaacctggataaaaaatacactgttaaatttaatccgggcgaatctaccggcagaatagttgacacaaattataaccccgaaatacaagtcggagactattactttgccaaagacggcagctatggtcattatacaggctacagcaaagcggacagaagcagctattttaaaagcggcgagggcgagggcggagccggatattgctattggtatgactggcgcacctggaaaaacggaagctcatactttacaatgagagccgacgacacccctcttttaaacacaagaagctaccaatatatatccgctgactggagacagtcacgctctgtttacggcggtcagaaagttgttatggatgtgtgttcaacaggcggcgaaacacttaaaatgtccacaaaaagtattcaaaaaaagagtgatttcagccgtcaaatgtcggacaggattctatttttaaactcaaacaatcttcctattgaaaacaacatcaatataaagatgtctgccgtggacagcgagagcaacagaacccctaaaatagaattttatacctacggcatagcggctatgtaccgaaagtttaatataactctcttgcagccggataatcttaactaccgcacggctgacggaaagactgcgtcaatggctccggcaaacgtaagtctcggcgaggggcacggaaccaggtacagcgagcagaacctgcagataaaggttgcggaaacaaccagcggagaaccaataaaaggagtaataaaaaaatataaaataacaacaggtacggctaaagacaaacaggttacttttgagtatacgccaaagggcgacaatattcaaaatattaagtttgaccatgattttatcaaagcgcttgatgataatactaaacaggtttctgtatcaaataatactttttatactgatataaaaatacagccggtgtttgattatataaacacagaagtagaaattttaagcagtaaggacggaagcttttctgacagctcactctctgtcggcaaacacgcatttcacgttggagacacaatacgtcttaacggtactcccgcaaacgaaaacacatattatataggctataaggaaaaggcatataaaaacagctctgacacatatcctgatatctcaggaaatatggatggggcaagggacgtatttttagaccaccagagatattcattcgagccgcgttttactgctcagcagaatcatataaggattgagctgactgataacgcaaaggataagctgtctattttaaataaagttccggacagcgagcttcccgacagtctaaaaggcggatatatacttaacaccggcgagaacggatatgaatacgttccgacaggcggaaaggtgtatcaggttgaagctatttcaaaaaaatccgcagaaagcggcaagatataccgtcccaaattcactctatcttccagcagtgaaactataaacggaaacgttatggattttgttgcaggggattatccggctgacaacgtagtaactgtcgacgttgaggaagttaatgaatccgacctgacttattttaaagttgacggttttgcaacggttccgggcaacgcagtcagaagctctgcttttaatgtaaccgaagccggagcggcaggcgtaacagttattgccggaggtatagaatcaaaaatatttaatactaaaacaaactcggttatgaaagttattgacagaccaaactccaccacaactgacaaaggggaattttcactcaaaggtctgtatgccaaaaccggagacagaataacagtttgcctgacaaacggtgatgttgaaagagtagagtacgtaacccttaactctgcaggtattcccccggctcccgtatcatacacaaagaaagtctatgatgaagaaaaacagcaaactatagacacgccggacacaaaagatatgtacacaatgaactgcggcagtataaacatgcctatacgcacacctctggcaccgttcgtcagcagtataaaatacacggttgaccaaatcccggatatcactatcgacaccagggataatgcaatacctattgttgctaccaagctgtatgtaaccgctgatattaatctaaacggacgtgaagtcaagtcggtcatattctccaaagtatcaaaaaacggaagccgtcaggaaaagcaggttgacgcgtcctataaagggcagataagctttaaggttgaatatcaaatggacacagtattcgaagacggagatatgctttatgtgagccttattgattctgaagacagaattatatcgactaacggaacagatgaaaacggaaatactgtttccactaccacaacagaacccagacgttattttgacgtttttacaggcttaacattctatatcccatcccttgaagttgaaccgcagacatacgatgtaaacagtttgtccagcgtagatgttccgatactcggagaaatggcgccgaatcttgccagcggcggactcagttttactaaaacaaaactggataatgacgaccctaactcaccgtattattatcagtttttatttacacccggcgtttcaaatatggcaaaacaaacagcaatgacaacgctcacaacgctccaaaattcgaaaaacgatgcttataaccagctggcgtccgaaccagaaaatgaggcggctcttatgggcgagcacattaataatctgtttgcagaaaacagcaatgaaaccagcaatgatgtcagtaacagaataaaccaaaatgcaaataaaaagtcactggcaaatatgagcaaaggtataaagttcgatgttcaccttacaatcctcctatccttctacttctcctatgtgccgaatgaggatggaagcagcggagaatatatgatgacatccggacaatactgtatcggcgcatatgcgggaattgcaaaactattttattggaccgtgtatggggttcctatgtatgttaagctttcaggaaatgttgaattagatttttccggaaactataccaccgaaaacactcaaaatattactgaaacagattttaaatacgttaaaaatctcaacgacttactgaatccgcagaattatatcatgttgggtttaggcgcgcaagttatggtcggcgttggaatttgcggggttctgagcgtacgcggaattgtctcggtcgactttatattcagatttaaatacggcgcgtcaaccgaagaatatatggacggctttctcttccagctgggaggcggtttcggaatagacctgtttatattcagctttgactatgttcccagtttggtgacctacggcacaggcgtatataaagacgttaaacccgatatagcttcactggagagcgacggtcaggacggcgagatatcaattcggccgctgagccggggcagttcagaccataacaatttcggaaattcagacattgttacattggccgataatgcaaatgcaccgggataccaaatactatccgaaaacacagccgaaagagcaaagccacagcttataatgcttgataacggcaagaagatattgttcttccttgataacgacccaaatagagcaactcttgattccagatgcctgtactacagcatttgcggagacaacggggtttggtcaaaaccggaaaaggttgatgacaacggaacctctgattcactgccgacagcaataaaatcagggaacaaagtcatagttacatggtcggacgcaaaccaagcatacggagataacggagaacccaaagacgttctcgccggccttgaaatggcatatatagtatatgattcagaaacagaaactttctctgaaaagacggtgcttaccaatgataactttatggacagcgccggaagttttggatattcagaaaacgccggcaagggattctgctactatgtaaagcgtgacataaacagagcggatgcagacaccgaccttatagacgtcagtgctacctatactacaatggcatacaggatatatgacaacatcagcgatacatggggagacgaaatgtatcttgacataccgtgtgaaggcataacagaccctctgatactggattttgactcagaacttgcccagtacggcgaaaatgattatgcgctcataacctatacaatagacaaagaccaaaacataacaacagttgacgacagagacatatacttaatgataaccaatcttacagaaaagaaaagttattatccaatacagctaactaataactatcattctgaggtttcgcctaagctcactacttttgacggagaaatatatctgtcatggataagcgacgccagcgacttctgtatgataaatatcaccgaagccatcaacactatagaagaaaacggaaaaatggatatataccaaagcgcagatacaaactcgccgtcgtggtataagctgtcagctgaacagcttggaatgagcgaggacgaatatgctgaaaccctgtttgacaggctggcgaacagcaggtttaccggagacccaaccaacttctcagaagatgaatatattgatatgaatattggcagctatcagctctataacaataataatgaagctatgtacctgctttggctggacaacggcacaggcgaaaaaggtgatacatctcaggaactgtacggagcaacatttgagaaaaacgtttccgaagactctgaaactgatgaaaaatacagcggttggagcgacgcggttaagattactaattttggtaatgtaatagatgaattctctgctgtatttggttcaaatcaggaaatgttcctatgtgcaaacatgttcgaccaaaaaataggagaagaccgcacagtagaattctcacagaacgatttgataatgtttgacctgccgagaaccagcagtttaaatctagcggaaggtatagattttgaggatacgcctataccgggcgatgaaacaaatataactttcaccctggaaaacaagggtatgataacatcgggcggatataacttaacagtgaaacaaattcaaaacggaactgaggaggttatctgctatctgagcgatgaacctatcatagccggagacgaggcaacatatttgattccttggtcagttcctgaatcgatagacggcattgaaataaaaattgaagtttccgaagacggatttgcagacgaacctataaccgaaacctgtcctgtgcctcgagaggcaaaattaattctgagcggaacctcttctgactatacagacggcactgcctatgttacaaccacgctcacaaacagcggaaacctaaccaccgaaaaggcttatattgtcgcttcggcaaaagacggagagaatggggaaccaggcaaggaatacggttccgtctcagttgagcctattgctccgggtgaaagcataaccataacctatccgcttaccaatttcagttttgatgatttggatgaatacggaaacgccgagatatttcaggatgtggaatgcggcagcataacaaacggcagcactttaaaatccgacagcagcatactccaccaaagagaaatagctgatattacttttgactgtgaaagcacaattgaaattacagcaggcgaaagcaaacagataacgggtgccgtccaaccggcaaacaccgcagataaagaattgatttataccacgtctgacaatactattgcaaatgtaactaccacaggtttggtaacagctatagctaatggaacggttcagattacggctataaatcctgaatccggatttaagaaatcaattgatgtaaccgtaaccggcggcgcacagcccaccccgacaagacgtccgtcaaacggcggttcgggcggttctgcctggaatccaacctccagtcctgttccaacccctgaaactacgcagacgccaggaaatgaatggataaatccatttactgacgtgaaggaaacagactggttctataacgggataaagtatgtttcacaaaataagctgtttaacggaaccggcgacacaacatttgaacccgacagcaatataacaagaggaatgtttgtgacagttttgggacgcgcagacaatgccgaatcagaatcttcaagtccattcagtgatgtaaatacaaatgagtattacgctccgtatgtctcctgggcagctgaaaacggaatagtcagcggttatgaagacggaacattccgaccggataacaatatcacccgtgaagaaatggctgaaatatttatgaactattatgactataaaggcgagggtctaacaggtgactgggctattcagctgacttacagcgacataagcgatattagcggctgggctgttgacggaataatgttctgcacaataaaaggcttgatacaaggcaaagaaaacaatatgtttgacccgcagggaaatgcaaccagggctgaaaccgcggtaatcatgatgcgtgccggtatgtaaacaataattccggctggctgaccgtattttttataagataatagtaaacatagtttgcaacggcttttgataaaactttataattaaccggcatattttataaattacagtaattattgtatttgttggattatgatagaagtatatagtttatcagtatatttcaaatattattgtaatcataatccctgtcatatttaactgcaaaatttaaagactgagcaaaaaaatctcgtgcgtcgttttattaggctcacgagatttttattgctgacttttggtacagaaaatctccttgttttaaggcaggaaacactttaaaatgcaaaaaactgccgcaataaatttataaacaatttggcggccgaacctgccaatctttaacaacatttctgaaattatatcattgtatttttataacaatcattaacaacttgactgcaacagtcgctaatgcgcggctgtcagtgacataataaattattctgtatcacacttataaggcataagtacaccccccagctcaccgcatagtattgactataaccaatataccgcaatcaggataccattatgctcctgcaaaatagatatgggcactctctccgtcccatataattttatcaacaatagttctgacagcttcccttctttcacgtacctctattaatttaatcactgattcccatacagttaacgtatccgttatataattgacatcaacactttttttattttcagatgttttaataagttcataaagtcgcttttttaataactcattttctttgtgaagttcttcaatttttttaataatatacttatccgccacagtcttttccagctctgtgagattttctaccaaagaagcaatttttctattatttacatttaacccctcatttagttcttcaatctccgtattgcttcctctgccgtcactaaatgtttttttagccttattaagtatataataaagctcttttttatcctcctcaagttttgaaatctccttaataacctcagcgtcaagctcgtttcctgctgggtttgaaaccgaacactcgcttcgcctgctcttttctttcatctcacaaagatatgaaaattttttctctccatccttataaaatgaattatatattttaggccgcatataatgtccgcagtcaccgcagtataaaagaccggaaagcaaagcggtattatttttaggttttcggtatgctttcacggaattgcgctctaaacattcctgcacctgtttccactcttttcccgatactacgcctttgtgcctgcccgctgtgataatccactcttttatatccctgattttattagtctttccctttttctgcaaagtcttattatatgccataacgccgcaatttccgtcaaaatctgatttttcagcaaatatttcagcacccaaaacgctgagatattcccaggcatcactatcagctatcatatacaccgggtttcttagtattcctttaattgaaaaccttgaaaaatcttttccttttctagttttaatgtgattttgtatcatataggtttcgactgctgttagactttctgattccaaaaacttttcaaaaatcttttttacggctgtcatttcagattcttctatcttcagcatacatgagcttctttttttaccgtcaacagtaatagtttgaacctgaaccgacctataccctgtcggagtatttcctcccagccatcttcccgtcttagccaactcgtgcatattgtcgcgtattctctcagctattgtctcacgctcaagctgcgaaaatactgaggcaatatacatcattgcacgtcccaaagacgaatcagtatcaaacttttctttgatagattcaaacgaaatgcctagttctccaagccggtcaatcaacttagcaaagtctccgatattacggcttatcctgtctagacggtaacaaataaggacattaaattttttctccgacgcgtcatacatcatctttttaaactgcggacggtcagtgttgccccccgaaaacccctcgtcttcataaataaatatatttttttcggaagcatttggataattcaaatatatatatcttctgcacagttcaatctgattttcaatactctcgccttttccggtaaaacgtgattttctcgagtagacagcaaaacgcttattttcgtcattcattctgtcatcggcctctcatgtgattttaactatataatatataatatttctgctcaaaactgattataccaatccgcataacgaatactgtttaaaataaaaaacacggataaatccgtgtacgattttaatatatattttttatttcatattatatagtgtgaatatattttattaatattatagggtgttaacaacaatcaagtatactaataatttgaatacaaaatgtataaaaatcacgccatatgagatgcacagtcattgtatatatggagagtagacaaaaactttaaaatcattttaagatcatatatattaaaaatgcagttttgtcatcacattcaggtgagtgttagccgcaatagttttttatcttaaacctacaatatcaataattttaatactcgaacataatttgtatattcaaataataatttgaacacgcaatgtatccgtagtttgtcgtataagtagcgcagttgtggaaaagtttttataaaatcgattatagcaaactgttttaagtatgttcacgctacgcgtgatatggcagctcacctaacgaggcgtgcagcacgccctgccgcagttcacaaagaaccccccttaattttccgtctagttttctgttgacttttcgaattgttgaataataaaacaaatgtattaaattacacattcctttcaggtgtggtcataatgtaattcattgacattgtaggtttaaaataaatagctggtgcgccttacactcacctgaaggtgaggtcactgtcattgtaggtttaaaataaatagctattgcggcttacactcacctaaaaggtgaggtcgcggacattgcagtttttaaataaatagatattacgccttacactcaactgaaggtaaggtcacagtcacagttctaacgattctaactaaaaaacataaagttttgtttagtttgaaatttttattttatgtgatttatgcaaacttatccatacaaattagaactgccgaatttgcgtatattatgtaatattttttcactcaatataaactaacttccaacagaaatatttcaattattgttttctgataaaatgttctcacaataatcttttagtttgggtatatcatcagtcacagtttcccacagcacctcattatccagttcaccataattatgggcagctatattgcgtattgatcttatatccttccatggcattttattatactttttctttgtttcttccgtcagttttccaaccaattcacctatctgaagtatacacattgctatcgcattttttgcaataaaatcactctcaaacatctcaaaatctaaattcattttttctattgtccattctatctcatccgcataccttatcatcttttttaaaatagtcaaatctctatcgttcatatataattacctcatcttttactccgtcctttataagtgagttttccaatgcttcataagtcagaacatcaacgtgcgttccaaaaagttcctccaaatcattaacgagcccgcagaaagcaaaataccctttcaaatcacctttttttataattaagtcaatatcactggtcactttcggctctcctttggcgtaagaaccaaataaagcgaccttctccaaaccataccgtttagccaccggaacagcaatcgcttttatttcttcaatagtataagtcctgttcatatacacacccctctttacaaaattctttcgcttatattatatcaaaccaattattaaaaatcaaaatgttttgattttataatatttgttatacaaactatttcggtatcaagctttgttatattatatctcttatttaagacatcaaataaatataagcttttattgatatcaaaataaaatctgcaaaaaattaaccagtttaattctttacataatcctcttacaaatttttccatgttgatatgtgtgggaaaaaaataggtgctatactatcaccatggaataagtataaacagcaataaacgccccaacatataatatttttgcgttaaatgtgcttcataatactgtaagcgctgcctgccgtcacaacagcagcgctttttccatgcaacaaaagcatccaattgatgttttttattaaaggcgcctaaaaaaatttttggaggtggtaaaaatcattttagaatcagaaagtacatcatatgtaaacgcaagcactgccgaggcaattaaagatacattgcagtccaaatttgaaaatattcaagtatctctaaacttagaagatattgataattcaaaagaacattttatagtggagcaatttatatcaagcctaagcaaagacaggaaaaaagtgtatattaaaaacgagttatttctcatacagtatttccttcctgagggtacagctgacagaaatcaaaagtatatacaaacaggtgacagtttgtatgaatacttagaaaatatacctttcagcaattcagttctgcatggaaatagtatgcactataaaatttcagacggcaaacttgttttcagtatcatgtacacacagagactggtccttcaagaaacatccagtcctcttatgggtaagttatatcagaaagataacataagggtatgagaaaatgtataatttttcaaacagttatatcagccgcacaggatttttgcctatacgccttatccggctcacggtaagcgcgtcgctttaatatatttagtgagccggaaaggtgtggtaataaatatgaaaaaagatagcggcagcccgcaaaaaacaaattccataaaatactttaaaaacgaaattttaagttccgttcatgggataaaaagagatgttttaaagcttagtctagatgacaaaaagaaatataccatatcagaagcggaaaaaatttattcagaaacattaaataacttataaggagagatgtattaatggcaggaggaacatttttaactaaaaacaaagtgagaccgggagcttatgttaacatagctgccgaagcaaaaacgtccggaagcatttcagacagaggtatcgtcgtattgcctatggatattgattggggtgcaacacttacagtaattaattccggtgacaatacgttcagcacgcttgggtatgacatatcggatccaaaaatgctgctggttcgcgaagctttgaaaaatgcttctaaagtatatgtataccgcatgaattcaggtaaggatgacacagaaaaagcaaaagcaattatccgcggcatcactgcaacagccaagtattttggagaattgggcaatgcaatcaccatagaagttctagaagaattgaaaggtgaagaatcaaccggttattataatgttaaaacaagtgttggaagtaaattggttgattcacagagaataaagactgtaaatgatttatccgctaatgattgggtaacattcagcggcgctctggcagatgaaccggcagctgaaagtattaaactgacaggaggaaaaaacggaacagctgacagctatgcagattttatggagtatatacaaaatcttaatttcaatactgccgcattccctataaatgaggaagacgcagcaaaaatattgcctttggtaaaagaatacattgaacgccttcgtgaagatgaaggtatcaaggttcaggcggttgttccatattttgaatctgtcggcggaatgaattatgagggaataatccaagtatacaatggctttataatggctgacggcactgaaattgataaggtaaaagcaaccgcctgggttgccggagcagccgcaggagctgctgttaatgagtcaaatacctataagaaatatgacggagcgcttgaagcctctccattgctgttaaattccgaaataattgagttgattggtcagggcatgtggttatttaccggttctgacggcaatgtcagggttgaaacagatataaacagctttactgaattttcagcagtcaaaccgcgcggattttcaaaaaatcgcgttatcagagttattgacagtatcggaaacgatattaaagatatatttgaaagcatgtatatcggcaaagttgacaacagcgaacagggcagaaacctctttaagaaggaagtgctgcagtattttgagacaatgcaaaatataaatgcaattcaaaattttgatcctgactctgatgtaattgtagagcagggagacgaattagaccaggttatatgcgattgttacattcagcctgtagacagcatggaaaaactatacatgtcagtgactttgtcaatataatttcaaaacacaaaataaacattgaggaggactaattatgtcatatttaaaagcacaagatactattagcggaaaagaaggtaaggcagtagcaaccattgacggaaacgtggaagatatgttctacatcaaaaaaattgaagcaaatgtagaaaagaccaaatcggaaataaaaactttgggcaggcgcggaacacagcacaaggcaacgggatggagcggcaccggaagtatgactatctattatattaccacaaacttcagaaagctaatgaccagctatatgcaaaacggtatagatacctatttcgatatactggttacaaatgaagacccggcatcagacgctggctctcaaacaatagttttagagggcgttaatcttgacaaagtcataatggcaaagcttgatactgaatcagacatattggatgaagaggtaagctttacgtttgaaaacgtcagagtgttagacagctttaaagagcctgcattaggataattttgaattaggacggggcttatgtcccgtcctttaatattttatatttacaaggaggatacagtacaaatatgagcgagttacaagattatttaaacagtatgagcagtgatataacagacgatgttgccgtttctgaaaggtttgttgataaaaaggggaatttattgaaattcaaaattaaatcaatgagttatgatgattatgaatccgcaagaattcaggcaaccataatgccaaaaaggaaaaatgaacaaataagattcgacagcaaaatatttaacgataaaatcattattaacaatgttatcgacccaaactttaaagatgctgaaagcattaagaaaaaaggatgcgcaactcccgaacaatatttgcatgaaacattattgcccggggagattaacgaactggcaaacaaaatatctgctttaagcggatttgacaaagattttgatgaagaaataaacgaggcaaaaaactaataaaggggggcgattgggaagcaaattatgcctattatgccctccacaaatttaattgggaaccaagcaagtttattaatcttcctataaaagaaaagatatttgtgatagcttgtatagatttaagaataaaagaagagaaaaaagaaagcaaaaacgtaaaaacataaactcctaaaatatatactttttacaggatatatgacaaaatatagcatatagttgtaaatttttacaattttatgctttttttatacataaaattaggaggagtcaaaatgcgaaattaccaaccaaaaaagaacaacccatacatactgccgtcaaatttatatatgcgtatgctatatttagttagagactataaccgcttaaaagaagaatatacaaacattatacacgaaacgccgcacaacgatggtatgccaaaaggaaatatgaccggagaccccactcttgaaaaagttttaaaaaccgaatccataagcagagaagttggagcagttgaacaagctttataccaagtacctcaggaatatagaaaaggcgtgttcgataatatatgctacggagataaatttccaattatagcaggtgaggcaacatatagaagatggcggtgcagatttatatattatattgcaaaaaacctaaatcaaatttgatgaaaatttagatactcataatcagcagcaaatattcttagctgattaaaatttattttaatacaagcggaatcaactattgatgtgtcaaaatattttaatcagcgtcatctcatcgtatgggtttataaccaatataatccaagttattatactaaaacataaactagttataaaatggcaaatccataatggcataacttaaatatgcagtgatgaaaataactccttattctaatacgccgttcataattgcctattttctaaggtttatgagtatccgtaaaaactcaaattattataaaagggggaatatcatgacaattactaaaagcatacagtctgcccggtctatgacacaaaaatttttatgcctgcaacacgtcatttcggaaattgaaaattgctataaatcaacacaaaattttcttttaaagaatattgatgcacaagcactaataaaagattttttagacactttaaatacagataatttcaactatagatttaaaataccaattaattctattcctgataatgttcaaactatcagattattaactcacaaacttctgtatacacaattagtacaaaaattatttaactgcaattatgaaatgacaaatagttccggattaaatatcactgacactatcaagaagccaaacgcaaacatatttgctgcacaatctgctgatagaaaaaattatgataataataaattcaacaacgaaattataacagatagcgctcaaaatcttaatcatctatctgaaaacgttttgaataaacggttgaattatattttatataacaaccgttctaaaactataaataattctacagcaagtaatactcaaactgccaaaggattatcaaaaaaaatctctaacataaaaatgtttatgagcagtattgaaaaaacaatattaaaaaatatggatatatggagaaatataaataaaatttataacaaaaagggaaatacaaaaacacttgttttaaaatctccacaaatagaaaccaaagataataaattattagtttctttgaaaaaaagcaattttaatctgctgaacaaaaaaataaataaaccgcatttgtatttaaataatgcggaagctgaggcggttaaatcagaattagaccatacggatataattataaataaaaatataataaaccgtctttttagaaacagcaatatgaaaaattcttattttaatacgatgttaaataaaaatgataaaacaaatttattaacccaaaatgatgctgttattaacataacaagacatcaaaactatcaaataatacacgaagggtacaataacaatattcaatcaaactgcatgatagataaaaagatatttaatacgcttaataacttttccaataacaaaaacattactaaattcaatatagttaaaaacacctctgctagcgtaccggaaaatattaataacatttgttataacagcgttttttctgtaaacaaattatttaataacatacccaaaaagttatatatacctttaataaacaaaaacatcgcatatatcaatatagggacaggattaaataatttaaatatttttagtaacaaaacaaaaaagccttatgtttatgtacttaatatttataaaaaaattttttcgtcattaacaaagactgttatgcttagtaaattggcagagccaaaaatgtttagtaattataacaccaaaagccctttaaatattagcggtgtcaactacattaataacatttaccgtttatcagacaaagatttaacttcactgcgcaaaacaacaaattacgttaagaaaaatgtatacgcccaacctgtcattaatgttactaccggagatattaacgaaaaggctgacattgactttttaattaaaaagataggtcaatcagtacaggaaggcatggaaacaagcattgaaggagtggtgaactatgtataaaatatttctatcgtataataacaacaatgaggttttagaacttcctattctgcctgaaaaactaaacatcaaccgctttggacaaaacgttggaataaatgtattaaatatcggcgaagtaacccaacaaaagctgccgaaagcttttacaataagcattgaaagcgagtttccatctgaagaatatgcgtcttcaagagaaagaacaggtaactttacaggctataccaatccatatgattatgtaaatacaatactgaaatggcaggaacttcttaggcctataagatttgtatgggtaggaggcagtgtagagataaactcaccggtttctatagaggatttttcttattcagaacagggcggggatgttggaacaattagatacatactaaacttaaaaagctatacattctatgggcaggaaaaactgagtatcaacggagacagtaatttgttcttgtcaaattcaagagaggatatgcgtcaggtacccaaattatatacaactcaattcggcgacacccttgtttcaatttcccgaaaagtattcggcaatgatactcaaatcaataatctaataaagctaaatggattgacaagtgcagatatagcagacggaattccagcaggcacgcagttacgcacttactaagggggatggttgatatagattacacaatgcttttgagaaactcaaatgaggtatgggacatctctaactctgtaacccaggtcagatacaaatgttttcatattggaagatgcggcgttttgacattcaatatcatacaggagaatgtatcttcaaatccggcctttaatattgaaaacggaaacaaaattacatttgaatataaaggtaaaaaaatattttgtggatatgtttttaaaatagaatatgattttgacggcacttataatgttacgtgctatgaccaattaaaatatctgatgtacaattattcatatgtatttgtcaataaaacggcttcggaaattataacatctattgcaaatgaatttcagctgactatcggtgatatagaagatacaaagtttgcaattccgagatatgcacctaaaaataaaaaactttttgatattatatacgatgcactgcgaatcaccggcgataattcaggaagttcattctgtttatatgatgattacggcaaactgacgctgaaagaagtaaataaaatgaaaactgatttaactatcagccctgctgtcaacctaacaaactttaaatttacaaaagatatcacaaacgcatatacaaagtttatagttgcatcaaactataatgatgacgcgtcaaccacagatgagctttacacagcaaatcaatggcaggacgacgaacttatcaaaaaatggggtatattgcagtattttgaggtagcaaaagaaggtctgacacaggagcaaataaaacaaaaaattgaaacactgtccaaaatacatgcacaagaaaaacaatctatcacaattgacgcagcaggagaatttgttcgtgccggtgaaatcatatctgttgagattaaaaaatatgatattaaacaatattttttaattgaagaagccagtcatacttggaacggcggaatggattataacatgacgttaacattaaaaggcggtgttattaattaattatatacttttaaataaaaagcaaaagtttgttacaacactgaatataaaaactaaaacggggtgattttatggcaggattattgccgaataatgcagaaaatacaaactttagaaccacagatatcagctatccctcactgaccctcgggattgactttgaaaggaaaaagattataggattaatagacggcctggacgctatccgccaggctgtctttttaattctaagcactccgcgttatgagtatgcgatatacaatttccagtatggctgtgaaacagaaagcttactcggactatccgcggaacttgcacaatcagagataaaacgttccgttaaagaagccgttttgacggatgacaggataaaatctgtacagaattttgttttcaaacaagaaaacagtaacctgtctgattggtcattattttttgatgtagtgactaaggatgaacttgtagttggaatcaaatacaatatttaatacggaggtgaaaatatgtattatgaacaaatattatcaaatatgttgaataagctgccggacaattacgataaacgacagggcagtatattatatgatattttagcgccttgcgctctggagcttgcagcatattatcaaactttagaagcatatttagatttaagttttgttgaaacgtcaacaggcagctatttagagaagagaactgctgaacttgggataaaaagagagcctgctgaacctatgataataacggccgaaatcaaagatatggacggaaacttaatgtcaggtcttataggcaaaagattttctgcaaacggtcttgtatttaaagcgtcggaaattgatgatgaaaatccaaatataacacgattggaatgtgaacagccgggaaacgtcggatttctattgaccgatgaactaatacctcttgactatattgcaggatttgggtctattgaagtcaaaaatatcacattagggaaaaatgcagaaacagatgatgaactgaggaaaaaatatatatctattgtcaaccatccggcatatgggggaaacgctgcggattataaacaaaagaccaaagaacttgaaggagtcggcggagttaaggtaattcccacatggaacggcggtggaacagttaagctggtaatcataaattcttcatacaaaaagcctgacgccgccttaattagttctgtacaagaagccattgacccattagacaatcaaggcacaggcgtaggaattgccccaatcggacatgttgtaaaagttgagggtattcaggaggtaagtctcaaaatcggaacaatacttgcactccagccggactggaaacttgacgatataaaagaatccgttacagaagtagttgataattattttacagaacttgctgcactttgggaggatacagaaaatctcgttgtgcgcaaaagtcaaatagaaaccagactgctggatttggaaggcgttgcagacgttttcaacacaacaattcaagataaggaagaaaactatactttaggaaaatttgatattcctgtaagagagggtgaaataacaattgaagaaaaaactgattgattatctgcccccggtcttaaaagaagttgaagaattaaataatattttagacgtccagcagtctgaaatttacaacttaaaagattctgttgacagaatgtttaaagaccagtttatcgcagacgcaactgaacagggactttcaaaatgggaaaaaatttttggcattcagcccaaagcaactgaatcagagagtgacagaaaattcagaatttacactaggttaagcgagcaattggttcttactcttccgcgcttaaaacagcagcttggatatttgtgcaataatgattattctgtttcattaaaagaatacactctcaaagttagacttgccctcaatgtaaaatccaattatgacgatgttgccgcactgctgaaaagagtagtccctgccaatatcataattgatttggatttgttatataaccgctatatggatttaaattatacacatgactatctgtcgcagtatacatataaacaagtaagagacgaaaagttaggagcgtgataaaaaatgaaatacactacacactataatttcaaaaaacctgaaaagactgatttttataatatcgacgactcaaattacaacacagataaaactgaggaggcgctgattgccaaggcagataaggttacaaataacggtttcatagccggaaataacgctgcaaatgcagccggcggcgtggcaatcggaaattatgctaaggtaagcggagccggaggggcaataggcagcgaggccgaagctaaaaaaggctttgcaggcgggtattctgctgacagcaccgggaacggtgcttccgtcggctgcgacgcacattcatatcatggatttgcaggcggaaattgtgcgcaggcaggaagcggcgctgctgtcggcgacaatgctaaatgcggaacgttaagcaacggcgccgacattgactgcattcagcttggaaaaggcacaaacggaaaagaatttactctgcaaacatacaattaccaaattaccagctgtgatggaaccccctcggcaacaagcggaaaatatctaacagatgtaggcaaactgtcagatttgaagactaatgataaaagcaatattgtaagcgctttaaatgaattggctgactttaatcaatcctccgctattgcaataaaattttcgggtcaaattacagcgccatcatacgatgttgatataaactctaacggaaattgggaacaaatgtttaacattcccgctatagaagtgacatgcgcagaatttgataaaataactattcctgctcagcaaatacatgttgcggaaacatatgaccttggttcagattggaattgttatatagaatattataaatttaatggaaatatccaatcaagcggagtttgctataatattataaaaaatccctatgatagagaattctttaaaatcgacactacagacaacagtatttcgaaactaagaatatatattggaaatataaagctaggttacatttataacaataataatgaaaaagattactatggtacgttaacaacaccatttgaaacagctaggcttattactaacggcaattcaaaaaccagcaaaagttcaacaattacttttgcagctaataactcatctattgctgacaagctgtcagcagatgtactctgcgacggcacaaatgacagaagaataattcacgaatcgctaaaaaatttaaatggtgcgagagcaaacattgagtttaaatacggcacttataatttaaatattgacggcatagattattacagcgatgaccccgacttttccgacgcaaaaaactgtgctatacacacagcaaatatgagcataggaaatattatgggtaacagtgcaacatttaatataaccagtaatcttgttgggaaaaacttatgtggaattgaaggctatgacagtgatattattcgtgatttaaaattaaatattaacttttcatccggtgcttcttctgtatccatattgcagggcggttcttcctcatatttcgaaaacataactatttcatgtgtatcttcatcaaacgatactgaactgctttggttaaatggaggaaaatttgttaacagtaaaattatcatagatgcatgtgaaccaagtatttatgctgaaaattgcatattatccggagttcgggtacaagacaacataggttacgcacatgttgatgcaagaaacaatactactattaccggctgccgtggacttagcatttctattaaacaaaatgtttccggtgttatagcagcgaacaattccgatacagtaatatataatgcgtccacacttaccaacggaatctataataacattaccagctaaaaaaggaggaaaaatatgatatttacaaatcatcagcttttaaacaaagatcagatagaagtgttaggaactcagaagttagacttaaatgacttaatagaagattttgcagttacacctgaaaataaaattatttttccggcagcaaaaatagttcatccaaatacatctgaaaatactcatgataattcagcaaaccaaataaatactactattgtttatgactttgaaactctgcgcaaacttagagttcgttgtgacacaacagagcgcagccgcctaaccggaagaaacgaagaaaaatatgtacgcggtaatgaaaaagttacgcatgatttcttatatgtaggccgaaaacagctgcaaagttcagaaacatgccgggaaattgaagcacaaagacaaaaatttcttttagataacaattatcgtcaaatagttgtttcacatactgactgcggttattcgttcaggggcagcgaaaaagaaaagatggcaagagattatgcggatttcatatgcgacggtacaaatgacacagaagtcttacaacaggcaattgactcatatcccggtgaaaatcttttgatattgcttatggaagatgaatataccctcacaccggcaacaggaagcggaaccgaaaaagacccttacatatgcctgaaaatagaccgtgaaaacttaatcatacgttcgtgcgacagaaaaacaaatgtaaccttcaaaaaaggcattgaaagaagcaatgcctttttatttgacattcaatgcgataacgttgatatatccaacataaattattgtcttgatgaattagatattgaatatgaggaatataaataccctgagccgacagatgaaattcttaagataaaatcgtatatcgaaagttttgacccgtcggaaaagattttcaccaaaaagcaggcgctggatttaattaaaaaaagcatatcagaaacaaatactaacggaggctaaaatggaacatataattaataaagcaaatatactttggggaggtattgctgtgttccttgcaacggttttcggagaattttggtatttattttttggatttttggtttttaatatagcagattacttcaccggagtagcaaaagcaaagtatactaacacagagaattccaataagggactaaaaggtataattaaaaaagttggctattggctcgttattgccatagccttttttgttgcccgctcattgattgatatggaaaaaatagtcggtatagatttgggcatcactatatattttggatggtttacactggccgtatttattattaatgagatacggagtatacttgagaatctcacattacttggtgtcaatgttccgtcttttttaaccaaagggttggaagtcgcatcaaaaaagataaacgaaagcggtgataaaaaatgaattcaattgtagaagaagccaaaaagtgggttgggtatctagaaaaagcttctgattcaaacttgaacagcttcacagcaaatgcaggagacaataactatacacggtttgcagtcgattactgcagttactttggcgaaagcttaaatgtttatcaagctcagccatggtgtgcaatgtttgtgtctgttgtgtttgcaaatgtatacggagctggcaaagctgaagaaatgctgggcggacactttgcatattgcccatacggcgtagcaaattttaaaagcaaaggaatctggaaaacaagcaatcccaaaccgggagatgtaataatgtttaaagatagttccggcacagcttgtcatgttggaatagtctctgaagcaaaaaatggcgtcgtatacacaatcgaaggaaacacatcaagttcttcaggtgtggttgcaaacggcggttctgtggcagaaaaatcgtacagcatgtcatacaaccgcatattaggatatggcaatataaactataaggaggatataaccatgacgcaatatgaagaattatcatcaaaaatagacagcttagcagaaattatcaacacaatggggcatgagatagcagaattaaaatctgccgcaaacccaatgatatataattacatagacgacaatatgcctgattgggcaaaggctacaattcagaagcttgtcagctgcggcggtttgaaaggagacgaaaacggtcttaaccttgatgaaaatatgctgcgaatgctggtcatcaatgaccgcatgggattatacggcgaataaaaaatcttggtataattatgatatagctattattctaatacctttataattattataaggcgaggttatttttcattacatcaaaaaacttttattagacataaagttttattttttgataaaaaagaaattaacctctcttataaatagtctaattatccttggtttaaaactcaccaaaataatttatatgtatataagtttttaacggcatacaaatgatatgtatgtctaaattgttttttacacaaataatccaaatatattatcagtcagataacacggcttcaatttagcttaacacacgcaatattataacacaatattttttaccatatttaagggagagccgtggctctcccttattttcatacgaatttaataataattgattaaaaaatttatatattaaagattcaggaataaatacagtaaatagtataattcgcttcgttaactaacctattatgtttttatacaattaagaataatattatacaattttgattttagttttgacaataaaaaacacagcctaaatttttaaaaagactgtgttttttgttgcattatttttattctttaattttaaattaattttttatattaatatgttatcgatacaagataattttcatcatcccagtctacttgatagcctaggttttctgataaaaagcggagcggtatcattattctgtcgtttatcattcgtgctggaacgtccatttctttttcttctccgtttactgttgccgctgtattgtccatttggaatgttattgtttgatcattttgtgttactgtggctgtttttgtttcttcgtcccaatttacttctgctcccatttcttcaaacaatgctcgtattggtacaaaggttcggtcacttatcattctcggcggtgtatcaaacgtcaattcctgtccatttatttccactcttactatcgaacgctgtgctcctactacaacatcgtctcccactcctacgtaatagtccctattccaatacaacttatttattactttatcttttgggaaactttcatccgccgtccagtctattccgttgtaagagtataacattcctcttcctgctgctataaacctctctccatcgtatattatactatttatgtaatatccctcaggacaatttgcctgcgctaaactcatgtttgtagtatcaaaataatatatttttcctttgcttgttactaaaaacaaacctcttccataaaatattttgctgtcatcatattttgaatctcccccctcaggaccggaagaaagtcctaattcataccaattatctataactatacgactaccatcataatacgaatatctaaaatttccatctgttgaaaaataaatatctgtactatattttgatggagcacctgcatctcctccgcccataaatgctattctttttgtgctaaaatagacatttccatctgttgcaacttttccaccactatgactatattctgactcgttcgccaacttaggtgaataatagtctgcttctatttctattccactatttagattttcatatattggagcatttgttatattaataggtgtccagtctataccatcattcgaggttagtgttcctttgtttgactgtaatatatatagtccatttacatataacagcggtccttctgcttcatacggagcaactgtccagtttataccgtcatatgatacatatgatttatatggctcatctaataaatttaagaaaagttgattcccattagttgttatatatctataatctgcttggtgactgtacttaatcagcggatcactaattttttctataacccaatcttcaccatttgtggatgttaataagtaattcgggtttgatgtccatataacaaatttaccattatagtatataatttcttcatatcctgggtttgatgtgttgctataaaccgtatttttatatggatctatacttttccagtttatcccatcttttgaaataaaaagtttattcattttatcattagaaaaggattctttatatttttttataaaaaatatatttccatcacttattactttcgttgaatactcatatcttgaataagaaaaatttaaatcagagtatttatacccctgccaattaattccatctgatgataccaaagcataatctctactatctatagctactataacctctccattatatgccaccgaaatgaaatcatgctcttccagttcttttgtttcaaccgacgtccattctattccatcttccgatgttaatatatcggaataacaataatattttccattcttatatccattgtctcctccaaccaccacaaatcttgatgctccatatgttacatcacgcaaacctgagctatttaattttactttttgcgcattccattctgttccatttgtacttgtaattataagtccattgtctcctacagctacgtatgttccatcatgatacgctattgcatttagcttatttttatatgaccatgaatattctctgatatcataatatgtttcccaatctaactcattttctgcaaatacaactaatgttggtaccatcattaataacgccaacaagaaacttattgccgtttttattttgttatttaacacttattttcctccttttccatatttcttttattttagtatactataatttgtttaattaatcaagctttttattgtttttatacaatagattaatttaaatataattatacttttattattttcacaataaaaaacacagccttaatttttaaaaagactgtgttttaagtttctttattctttaattttaaatcaatactttgtttttaattaatatgttatcgatacaagataattttcatcatcccagtctacttgatagcctaggttttctgataaaaagcggagcggtatcattattctgtcgtttatcattcgtgccggaacgtccatttctttttcttctccgtttactgttgccactgtgttgtccatttggaatgttattgtttgatcattttgtgttactgcggctgtgtttgtttcttcgtcccaatttacttctgctcccatttcttcaaacagtgctcggattggtacaaaggttcggtcacttatcattctcggcggtgtatcaaacgtcaattcttgcccgtttacttgcacttttactatcgaacgctgtgctcctactaacacatcgtctcccactcctacgtaatagtccctattccaatacaacttatttattactttatcttttgggaaactttcatccgccgtccagtctattccgttgtaagagtataacattccttttcctgcggctataaacctctctccatcgtatattatactatttatgtaatatccctcgggacaattcgcctgcgctaaactcatgtttgtagtatcaaaataatatatttttcctttgcttgttactaaaaacaaacctcttccataaaatattttgctgtcatcttcccgtgtcctaagaccatatgtcccattggcaattccgaaatcattccaattttctatttgtataggattactcattgaataattatcaaaatttccatcttctgagtaatatatttttgtaaaccaataaaaatcttctattgtatacctataagaccttctgtctaatctaaaatagctatttccatctgttgcaaccactccatcgctatgattatatcctgactcgttcgccaacttaggtgaataatagtctgcttctatttctattccactgtttagattttcatattttggagcatttgttatattaataggtgtccattctataccattattcgaggttagcgttcctttgtttgactgtaatatatatagtccatttacatataacagcggtccttctgcttcatacggagcaactgtccagtttatgccgtcatttgatacatatgatttatatggagcatctaataaatttaagaaaagttgattcccatcagttgtcacatgtctataatttgcttgataactgtgcttaattaatgaatcactaattttctctgcaatccaatcttcgccatttgtagatgtcaataaattttctgggtctgacgaccatagaataaatttgccatgataatatgtgattacttcataccccagatatgaagtattgctataatttatattttcatatggatttataccttcccaattcattccatcatttgaaaaaaataaattatttatattataaatagaaaacaagtctctatatttttttattataaatacatttccatcacttattacttctgtggtacggtctttattagaagaactatgaattgaatcagaatatttgtatccctgccaattaagtccatccgacgataccaatgcataatttgtgtcgtctacaataacaaaaactttcccattatacgctgctgatacaaatctgtatttttctgtttcctctgtttcaaccgctgtccattttattccatcttcagatattaaaatttcagacgtactatattcttcctcgtatccgccgtaatatcctcctccaaccaccacaaattttgacgcaccatacactatatcacgaaatcgtttacaatccgtttcaactttttgcgcactccattctgtaccatttacactcgtaagtataagtccattatcccctacagctacgtatgttccatcatgatacgctattgcatttagcttatttttatatgaccatgaatattctctgatatcataatatgtttcccaatctaactcattttctgcaaaaacaactaatgttggtactatcataaataatgtcaacaagaaacatattgccgtttttattttgttatttaacacttattttcctccttttactttatcaatattttgttatattataccattatatattttataaatcaacccttttatttatattgtgcaacatatggataaatttttgacaacatttatattgtttttacgacataacaaaaaacacagtctttttaaagtattaactaaaaaaagactgcgctttaaaattatatttctaatcttgcccacatatatctaatcttgctcccataaaattttcaagacaattctgaattcctcttatatcagcttcatttaaaaatagtggatcagttccgtccgctaccgaatacgctgcagttactccggctgcatcacccaaaacacataaatttgcaaatattctcacaagtccccatgcctcagatgatacacctgcagcatatcccggcagcagtaaattggatacttgattagtaattagtgcctcgaaaggcacataaagcgggtattcagatgaataaaatttatccggattatagaaattacgacacttatctaaataattatccttaaaatccggtctcatcttctgaaaactcttatcatgccatatatatttaattccatctgaactcttttcgtcaataaggtctcttactccataaggatgaatatctaaaccatatgatgctattcctattctgtgactaaagtttttatttttctctttttcttttttatctattataacgtgatttgcatgagttaacttaaattcatcttgctccccttcttcaatctcgtcatatactccgcttataccttgaaaagcatcatcaatcataacatgataattattttcagaattatttgatctttgactaaaatttttagatgtatgcacagtttctcttaaatataatatatcacatatctctggctgaccaccgtcatcattactatatcctgtaaaactagcactttcaaatccgggaatatcatgtaatacatttaaaatctcctttttatgatatacgaaaaagtctcttgctttaacccacgcttcatctgtcgtcatagtatctttaaatatgtttttaggataaaaatcctgaatatagttttcatcttcagaattttcagaagaaaaacctctccgcccctctggtgtatccctatagttagcccgtccatccacgttaaataaaagaaaattatttatataataatcatcatttgccggattatttgttcctgcatttaaagactttattattattccttgatttgaatactcatcattgaatttccatgtttcgcttccttttatcttatatttatctccgccccataacgaatggtaaactccatttgtttcacttgaagtagatccttgataaccactcaaatctacaccttttaatttatatattatagttgctgcctgctgtcttactgccggcgtgttatcacatggaacagtttttgttggagaatcacttataactcctttttcatcatcatccaaactatcagcaggccagttatatctgccggttgtggctgctgtgttcaacgaccttgccagacggccttcctcggacgcatcaataaatatttttcccgttattgtaatcggagcggcatttgtccattttacatacccatttgtatagtctgctgcttcattatcccttgcaattcctcttatagttattttttctatcttaataggttcttcagtattgccggctgctttttctttacatattaccctgcttatatcatactgtgttttataatccacaagataatcatttaaactgctttttaaataattagacatctcctgtgtattataagacatcggaaacctattatataaggttttaaacgtgccctgatgataaaactctccattaggtgacttgctcacatcccaagcattctgtcctcctgttgtgctgattcctcctagttcatccaccggatacggcgctattaacagtatctttgtcagcttagtcgtgcgctgttttgccgccgctactgcggacgcatacgcctgcagtcctcctccgtatataactatatcataatcattttcatcccgtgcttccatatttgtccatatataagctgtgctttcctcattatcccagcctacttttttccccagcgcctcgcttataaatcttatcggtacatatgttctgtcactgagcacctgaggcgtaacatccaatattttagtctctgttatgggaagaccattattattccactcgtctattttttcaggacttatattaatactttccgtcctccacatctccaaattagcatccggtacatttcgccaaatactcatattacgttcgcctacaaccagtcttataactatactatccaatataataattattgtttgtttgtttccatctgacgcccataaaactttggctcctaatgcctcgcttacttttcttacgggtataaatgttctgtcattttcaataaatggcggcgcttcaagttcacccgcttcatttaaaaaactcatttctactccatttttaaatatccttacttcctggcttccgcttaatgcagcttctatactcataaatttatccgttctccttttccgtaaattttatataataggtttcgccctcagtcatcagcattcttacattccactctccgacggcaacaggggctgcaagggatatatcatcataaagctcaatttgcgctgaaatattctcgacctctgacccgttggggctggttttatatacaagagagtttccgtatggactgagtgaaaatacatagtttcttgttttagtcgggcagaacttataaatatatgaatctacttcatcatctaaggttaaagagtatgatttgttaagaacaaattccggatagtcgcttccgtctcctccccgtctgattaccctatccataacaacatacttttgtcctccctgaacttgcagcaaaagcacggtttcgccggttttaagcccgttaagcacagtgtattttttctttcctttgtatctgtgtttatgcgacgtatcaatattgggcacattaaatcccgttcccggatgataatggcttgttcctatggatttgtcaatctcggtttcctcatcaactttcattatgacctcgtggtctgttacatttatagacaggtcaagaaattcttctgttaaaacgtaatttgaatcgattttaattttcaaaggcgattcgctgacaaccactccatatacaatctgcaccggctcgcttgcagaaaccgcaccgacagcaatttctttaattaaatttactaaattacctgaaccactcaaaaaataacctccttaaataaattacttattttataatcattataaggcaaaaaattttcccacacatatcaatattaaaatttttctgctgaactccggctattttctgaaagatttttaagataaattctaaaaaacttatttggcataaaaccgattttaaccataaaattacaatttaaagatgtaaaatattttataaatatcatcaggtaaaataataattaaacacagacaaaatataaattaataaaagtatagaattaatttataaaaaacagttatacacaaaaaaagactttctcatatgacaatgttaaatgagaaagtcttttattctttattcacttttattatatagttttataaactgatacgtctgattttatatattacatttttattctctcacaatcagagccgttatgtgagtattggtttttcaacacatcgtgcagcgtatgttgcaagcttagtgccttttgaggcgtcaaaactgtttattcccttgataagccctatcgttcctatggacaataagtcttcgctgtcgctggcgcacgctgttgacgacgaatatttttttgccacatgagccaccagtctcaggttatgttcaataagtttattttttgcctcctcgtctccttccgccataagtctcaggcattccgcctcctcctctttggaaagcggtttgggaaaagagttgtggtttgaaatatatgatataagcaatattaatgactgtagtacagaatttataaaagcaagcataatatacctccataaaaaaagatgagtcaaggacgttaaagtctataactcatcatttggtttatatcgttaaactataagattatacaaatcaggccgccgctgccctcgttgataatacgctccaaagtttctctgagcttttgctgggcgtcgtcaggcattttcgacagtttattgtgcagaccctcgttaacaagttcatgcagcgactttccgaatatatttgactgccaaatctgttttgggtcgctctcaaactcgctcatcagatattctacaagttcttcagactgtctctctgttccgaccagcgggcttacctctgtctttatatcagcttttatcatatgaacagatgttgcgctcgccttgagccttactccaaaccggcttccctgcttgattatttcaggctcgtcgagagtcagctcatctattgatgggtatacgattccatagccctttcggtctacttcgcccaaagcatacgcaactttctggtattccttcttcatctttgacagggcttctatctctttaagcaaagcctgcttatcattgatgtttaatcctgacctttcgttaagtgtcttatagaacaggctgtcaggaaccgaaacctcaatccttgcctctccatatccagggttgatttcaacaatctgagctgaatccacaaactcgcattcttcctttaatattttaggaatcatatctacgtctgatatcttttcagcgttctcaatggcgctgtaaatatcttcagaaatatttgtgttatccatagaactaacccaagccggaactgacacagagagttccataagaggaaattcatacagcattttttccataatattgttgatatcttcttcatttaattctgaacaattcgccggtattactgtcgcgttgtattttccctgcatttgttttgccaattcttttgtttcctttgcgtccgggtgagcggaattaagaaggataacaaaaggcttgtttaaagcaagaagctcgtttataacacgctcctcagctccaacataatcttctctgggtatctcggttatgcttccgtctgtagttacaacaacccctacagtcgagtgctccgatataaccttccgcgttcctatttcagctgcctgctcaaactgcataggattagcagaccacggcgtcatcaccattctcggcatctcgttttcaatatgacccaaagcgctgggaactatatatcccacgcagtcaatcattctgactttcagattggcgtggtctcccacggttatctgtgccgcctcatttggtatgaattttggttcagtggtcattatcatttttcccgctgccgattggggcagttcgtccattgcacgttcccttttgtaatcgtttccgatattgggcagaaccagcagatccataaaacgttttataaaggttgattttcccgttcttaccgggccaactacccctatataaatatccccctgtgtcctgagtgcaatgtcattgtacaagttatctcgcattattgtttcctccttaaaactttggtagaccggcatgaatcatttgttagatgatatgcagaaacagacaagaatatgattgataaaattcaggttcgtaaccaaattttgatttttgaatatattatactgaggcaagttagagatgaggtgttaaaaatgttcagaaaaaggccctgctgcaaaaagaaaaacagcatatcaatactgggtccggttcttgtcgctctgggagtgggcgtattcttagcacaaataatcccgacctacctccttatagctttattcggtatcgcactcatttgcgcgggagttaaattcatatgcaaataaacaaaagaagtgaattcgttttataggttatcaaacctaaatatattataaaggagcaatacatatgcaaatcgttgttataaaacccccaaaggttatcagaggaatcctaaaactcatgtttggagtaaagaccatccgcgaagaggagtaaatattaaaccataatcataattcttctataactttctaaacaaaacaaacatattaagctccaccccctttcgtctttcaagcgtccggcgaaaggggtcctttctttttataatataaaaagccctcaaaaaccaaaacagtttttgaaggctgagtatttattttatatatttagtatctagtttccggcaaacgccagtatttttttcatcctgtgattaacgcccgatttggttagcggagggtttaaaagtccgccaagctcggttaagctcaaatccggattttccaaacgcagaatcgcaatctcgcgcaggtcgtcaggcaaactgtcaagacctgtcattttctgtattttctgaatcgcgcaaatctgttccacagacgcgtttatagtcctggacaaatttgacgtctctccgttggcgcttctgttaacatcgtttcttatctctttttctatcttaatattaattagctccatctgagacttatacgctcccaaaaatgagagtatatcagctattatctcgctgtttttaacatatgcgacatacttgttttttctctctatcctatgaaacttaaaatccatttccataaacagatttaaaagttcgtcacagagcaaaaactttgaggtcacaatttcaaaattataatttttcatcgggtcgctgactgtccctgcacccaaaaacgcgcctcttaaaaattcccgtttacagcacggccttttcactatactgcggctgacatggtagtttacgtctcctgtaatgctgttcagcaaatccaaatcatataacaattgagctatttttacattatctgatattgaagctgtgtatttaaaatttttatcgcttacctgtttcacatcagcttctatcccaagcaggcgtgaaagctccacaaaacttcccataacatcctgattgtcagttacaaattttatctcgtttttactgataatattcgccccaaatagaataaggcctgaaaaccttgcctttatacagcaccggtcaacgacctctgttctgtatatttcctctttaacacgtctcgaaaaagatttaacacaaccagacttatccacaactatcacctccgccgtgttttagggttatataacaaaacgccctcagaactgattttaagcccctgctcgttcctgtttatatttataatatcaagcagcgtatccgccaaaacgtttatatcatggcggacaaaaccattgccgtccacagtggacaaatccctttctaccacggttatatctgtagaactgaaacgttccttatcataagccacaggacacgaaccgtcatcagaatacttttcgagaagcgctccgcttatttttcctgtgttcacaatacaataatcaataaagctgtcatatgtatgatccaatatagccagcacatggtcaaaagccgtatattcatcagtctcgccgggctgggtcattatattatttatatatacaacaggagctttagactccattattgcgtcctttaaatcaccgattaccaaattcggcagcacgctcgtatataaactcccgggacccagtgttataaggtccgctttccgcacctcgtctaaaatttctttcagcggctcaacaggcatcaaataatcagatttagaacgcaagcgcactttttttatgtggctgttatggtcactcaccgaactgcctattctagactcccccaccacagtttgtccgttttcaagcgttgccaccaactctacgtcagaagccgtaaccggaaacacttttccggttatgttcagcaccttgcagacgtttcggacagcctcaacaaaatctccgctgaagattcctgtcatagccgcaaccaaaaggttgccaaaactttgcccttcaagcagaccgctgtcaaacctgtacataagcagtttttccattataggctcgacctctgagagggcgagaatacagtttcttatatcccccggcggaggcattttaagatcctccctcaaaacgccgcttccgccgccgtcatcagccacagtgactactgccgttatatcggaagtatatttttttatacctctcagcattgccgataatcctgtaccgccgccgacagaaactattttgggattaaacccggtgctgtttgtttttttgaaattttcatattttgaaaccgccataatacgatacatatagccgcggctatatccccttcttaatatctctgtgtgtaacagttacgttattaccgctcttttttaggaatttataaagctcttccgcaagggtaacgcttctgtggtgcccccctgtacagccgaccgatattaccagctggctctttccctctttgatatattcaggtatcagaaacgacaccatatccgtcagcattttcaaaaatttcttgctttcatcaaactccataacataatcgtgaacgcatgtttgaagaccagttttttctttcagctcgggaatataaaacggatttggaagaaaccttacgtcaaacaccaaatcagaatccataggcagaccatatttgaaaccaaatgacataacattaataatcagtcccaaatcctcttttgaactgaacatagattttatctgagctttcagctgggctgccgacaagtcggacgtatcaattatatgcgccgctttcgacttagcgtcgctcagcagaacgcgctccttattgataccgtcaattatcctgcctccgccggcgctgggatgcagacgcctggtttccttatatctttttatcaaagtctcgtttgaagcctctagaaacagtatttcacactcaaacccaagctcctcgagctcgcctatagcttctgacagctcgccgaacatatcgccgcctctgatatcggtgacaatagctatattatccattttttctgtcgccttatggcatatctcagcgaactttggtataagctccggcggcatattgtcaacacaataaaaaccaatatcttcaagcgccttaatcacctgagtttttccggctccgctgagccctgtaacaattaaaattttcacttttctgctccttagactttagaattcacccaaaaacttaacctctgtatttaggtcaaccccaaacttttctttaactgttttctgaacatgttttattacattccgcacgtcttcagccgtagcatttccattgttaacaacaaatccggcatgtttctccgaaactgaagcgccgccgtgcgaatatccttttagccccgattcttctatcagcgccgcggcatagtatccctcaggacgtttaaacgtgcttcctgcgctggctttgtctaccggctgtttctcaacccttctgcgggtaagttcctgcattcttgcctttatttcatcaatttcatcaggtttaagcctgagcgttccgcgcagtataatcttgccgctgtctgtaaacatactctttctgtagccaaaaccgcagtcttcgccgctcacggtgcaaatttcacagttttcatcaagataaactacttctgttataatgtccttcatttcaccgccgtaagctccggcattcatgtatatagctccgccgaaagagccaggtatacccgacgcaaactcaagccctgcaagaccattgcctgccgccgaatttgcaagcctggaaagcagaactcccgactgtgcggttaccatatttttagaaacttcaatgctgctcagatttcttcctatttcaataaccgctcccctgacgcccctgtctcccacaagaagatttgaaccgttgccgattacatgaaactcaaccttaaactgcctgaaaagcttgataagcgaagcaagctggctctcattctgaggagtaatatataaatccgccgctccgccgaccctgaaagtcgtgtgagagctcatcggttcatctgtcttaacatttgattccccgacgataccttttgccagggttataatcatgttattcatcgttccctccaatattatgtcttacaatacaatatcttttccaaccgaccttaaatagccgataaatctgtcagcacttgtgttcataaccaattcttcaggaaagtttatctcctccagcatctttatcccgttttcaacattcccaacatcaaacggactgtgcgcgtctgagcttaaaacaatcctgcatccgacttccatacacttttcagcaatctttctgcaattctcagcgctgcctttacgcaccgcatacgaatggttattaatctcaatacacttattattttctttggccgccctcacaacagcgtcaatatcatacggaaaacgtgggtcgccgctgtgtcccatgatattaacatacggattcttcaccacgttcagccatgtctcggtatggtccggcaagtctttagactcataacacggcggatgaattgaagcgacaacaacatccatagattttaaatactgaacaggcatatcaatctcaccgtcagaattcaggatatttgcctcgcagccgcaaagcagtctcacaccctcaatatattcgggcaattccttcattgtgttaaaatgccaaatatgaggggagtcaggaattgcaggggcatggttggtcatacaaaccatttcaagccccttttcctttgcacacttcatattttcccatatagttccaaaagcatgattgctgcagtttgtatgagtgtgtgtatcaactaaaactttcaaatataattacctccatagcagtttatcaattaaaattgactgatttggtcagttattcttctgttaagctcctcggccgcattataacccatacgtttctgtctgttattcatagcggcaacctcgaaaataacggctaagtttctgccgggctttaccggaatagtaagagacggaatatccaagcccagaatattggtatattcatccacgagacccagcctgtcatactgctttcccttttcccaggcttcaagatgtataatcatatcaattttttcagactccttgacagcgcccataccaaaaatatttttaacatctacaattcctatacctcttatctcaataaagtgtctgattatatcaggagacacgccaatcagcgactttgaggaaaccttttttatctcaacggcgtcgtcagccacaagcctgtgccccctcttaataagctcaaccgcagtctcgctcttaccaactccgctttcacccaatataagcactccctgaccgtatacttcgaccagcacgccgtgccgagtgattctaggggcaagttccacgttaagatatgcgtttagcgaacttgtaaaagacgatgtaggctgagaagttctcagcaccggcgtttcaaactcctcagcaagtttcagcatctcggcagaagcattactgtttctagtcaaaatgacggctgatatttgtttttcaaaaagtcttttaagactattgtaacgaacctcagaagacaatccggcgagatacgtattctcgaccataccaaaaacctgaatacggctcgggtcaaaataatcgaaaaatcctgttatctgcaagccgggtctgttaaggtcggctgtatcaatcaaaacttctttattcggataataaagtctatccaatttcatttcacgtattactttttccaaattaacagtaaatacttctttttccataaggcaatacctctgattttcaaattaaatatcttaaacaaagtaattatactattattagaaccattttgcaatagatttttcaatttaaagcgagaggatataaacattttcggctattttgttaataaggcaaataatttattataaatatacttgcgcgccgcgcgccgctgtggttccaaattaatgattaaattataatatttatcattaatttacatcgagtttccagcgaatcacgtctgggttgcgaccacatctgccgatgcttgccataccaaaattttatataattttttattttaaaatattttcttatatgctgagttttttagtgaacttcggtaggacgcgcttgcgcgtctcgttaggtgagccatcatatcacgcgcagcgtgaacatatatgcaacagtttattataatcccttttatatttatcttttccgcgactgcgcaccttacgcggcagattgcatctgccctaccgatgcttgctataccgaaattatatatatataactttttatttaaaatattttcttatatgctgagtttttttagtgaacttcggtaggacgcgcttgcgcgtctcgttaggtgagccatcatctcacgcatagcgtgaacatatatgcaacagtttgttataataccttttatatttgacatttccaagactgcgcgccttacgcggcagattacatctgccctaccgatgcttgctataccgaaattttatatatataattttttattttaaaatattttcttatatgctgagtttttttagtgaacttcggtaggacgcgcttgcgcgtctcgttaggtgagccatcatctcacgcatagcgtgaacatatatgcaacaatttgttataatccctttatatttatcttttccgcgactgcgcgccttacgcggcagattacatctgccctaccgatgcttgctattccactttttatatataactttttattttaaaatatttgcttatatgctgagtttttagtgaacttcggtaggacgcgcttgcgcgtctcgttaggtgagccatcatctcacgcgcagcgtgaacatacttgcaacagtttattataatcctttttatatttgacttttccgtctcatcttattgtagtatttctctgcctttttaatgaatatcggaaggcttagatattgccttccgatatttatttacattacacgctttcttatataaatataagaatatcaaaattttattatttcattttataactaaaatggttccgcacaacgagcgggcggaaccaagactgctaattctgcttatttatctgctgtccttttatcaaaggatatgagactagctcctcactttccaaatcctcgttatacatattcacagctgtgatttggctgttttcatacgttgtataataatatatccctttatccatattgcagcaggagctgtatattgtgatttcatattttccctcctgcatacatacacatcccctctgctgtgcaacagacccgagaatgtgaaaaaactgactgatactttcagattccgaccagcctgatattgagtttaattttgtaaacgccgctttcacaaaacgggaaactgacgataaatccccaggaagaccaatccctcccataccgctgcaatactcctttaacttcaccttatttgaaaactcatttgttggctcttttttggaaactttcatatagttatttaaattaaacatctgaaaatcaaatgtgggattgtttgttaaaactcccacgggattgtcgtaaacttttaacccctcttttacacactccactgtaattgagcagtccttatcagcgataagccaatgcagcggcgtggaaatcagcttcttattaaaatttacattccatatatttacatttttcagaagtttctttgtttcttcaactgtttcacactgccctaaaatccatggaataagctcatatggagcgacgttgtccttcccctccgcaaaatctttatattcggcgttatccgggaaattcagccccgctatgctcaggcctttttcattggttgcatcataataaagcggataatcatcaaccacatatgccatgccgattatagcatagtgagattccatatttttaacgctttggaatgaaaatggatagttccgcggagttattgttactgtttcagtataagaaaaataataatcaaggtttcttccaaaatagctgtcaactgttttataagttattgccgtgcacatcttatgccgcctttcgagatttattttctcttcagatttttattcaaattatatatctattatgtcttaaacagcgtattgataatcgttttaagcagtatcgtacttaaatatattaatctgattaatctgcggccccgctctgttcaaacacttaaaaactccgcttcaaacgtcattgctttataatcataagccggcgccggtacggcatttttgagtgtatttttttaaatatataaaataattttgtgtattttaaccttgaaatttctcctatcaagcagtataataacaaatactgcagaaaaaacatatatataccaatttaaaggagaagtaatatggtcacccttgataaaatataccacgcgtcacacgtcttaaaagaaatcatcagaccgaccgagcttataaaagctccgaaaatctgtcctgactgcaatctttacataaagacagaaaatcttcaggtcacaggttcctttaaggtcagaggcgcttattataaaatctctcagctctcagatgaggaaaagaagaaaggcgtaatcgcctgctcagccggaaaccacgctcagggcgttgctcttgccgcagccaaaaacggcattaaggcaaaaatatgtattcctgacggcgccccaatatccaaagttgaggcaaccaaaagctatggcgccgaagtctgccttgtaaaaggtgtgtatgacgatgcttacgaaaaagctgtatctttggttgaagaaacaggagccacttttatacatccgtttgatgatgaaatggttattgccggccaaggttcaatagggcttgagattattgaacagctgccaaaagttgacgccgtaattgttccgataggcggaggcggtctcatcagcggcgttgggtttgccctaaaatcgctggacccggatattaaaatttacggcgttcaggccgagggcgccgcttcaatggtaaaatccataaaagatgatgaaatagaaacgctggaagacgttcataccatcgcagacggaatcgcggtcaagacgcccggagtcaacacttttgaaatctgcagaaaatatgtagacgacattgtaaccgtaagtgacgacgaaatatctacagctattctcgaacttattgagcgtgaaaaaatgatagcagaaggcgccggcgccacatctgttgccgccgctatgttcaacaagcttcctattaaaggaaaaaatgttgtttgtcttgtttcaggcggcaacatagacgttactatactttcaagagttataaacagaggtctccaaaaagccggacgtttggctgagctggtagtagaactcactgacaaaccgggtcagctattgggagtttcagaaattatttcatcctacggtgcgaacgttgtttctttggagcataaccgttcggatgaaagacttgatataaacgactgcgtgctcagaatatccatagagacaaggaaccaggaacatttggatgaaataaaagacgcccttgtaaacggcggatttaaaattacataaatcattattcaaagatatatattacaggaggtataatgatgaacaaaatacacacaaataacgcaccggaagctataggaccttactcacaggcagttgaatgcggagggctcatatatacgtccggacagattgctataaatcccgaaagcggacagattcaaagcaatgacataaaaggtcagacaacacaggttatgaagaatctgactgcagtgcttgaagcggccggaagctcagttgacaaggcgataaaaacagtttgctttttagcggacatgaatgattttgcctcattcaatgagatttacggagaatatttcacatccaagcctgcacgctcctgcgtagctgttaagcagcttcccaaaaatgcgcttgtagaagtggaagttatagccgaaaaataataaaacaaattatagttaaagtctatgctgaataatttaaataatgtgaactgttcagattcaacatgcaataaaatatcataatacatttatagcatatttaattttaagcatattaaagacatccagtggcaatattgccactggatgtctttatcttgtattattaattaataaaactatatctacagaaaccgcacataacgtctgccttactcctatatagaaaattaaaagccaaatacttttattgcatttcaaatgcgcctttgggacaaaacttcatacattttccgcacagtatgcacaagtcataatttatctgcggtaatgaatgactgtctttttgggtaattgcattcttagggcagacttttattgacgggcatttgtggttttgcggacacttatctttatttataattactttcatagctatgtatctcctttttattatttttaccgcaaacattaacctgccgcggatttacagcattaatatactattattcagagggcttgtcaattattgatacacaattacatttatttaccactcctttttgacttcttcctctttaattaaatatgttcaaaaaatttaaaggttctataaaaaactctgacactcacaacagaaccattataatttttatttttagtcttataaatactgcacattcaggattttgttttaatgtataacgttttttataattattaaaaactacctcctctctttccttatataattaactttaaatcaatctaaattataaattgatttataaaattagtactgaagatatgctgtataaaatgtctatatttattttttattcaatatttactattttttacatcagtaataaaattatatatattttttcattaatccaacatatttattgtacaagttaaataaatatttttcgacaaactattgctatttttcatataatatattataatataaaaatatattagattaacaggagggagagaatatgaaaataaaaagaacattttgcacatatattttattcttttccttattttttgcggtcacatttgcatgtacggctgtctgttctgctgaaaacaacagaacaataaaggtaggatatcctatacaaagtttaatgaccgattttgatgaaaatggaaattatactggatatacctacgaatatcttgaagaaatagcccaatataccggatggagttatgaatttgttgaagttcctggcacagccgtcgaacaggtctccgctcttatggaaatgctgaaaaatggagaaatagacctgatgggaacaacgctttatgacgaaagcataaaccgagaattcgcctataccggtcatagttatggttctgttgagacggttctgcaaactttaatcggtcaaagtaacgataccgccgttgactcaattgttatacaaaatatgcgtatagccgttacgtcagatacagatgaacaacatatacgcgaacttaatgaatactgtgatatgaatctgattacacctgagtatgttgtctgcgcaaattatgaagaccaaatagacgcactgaaaacaggccgtgccgacgctatgctcagcaccagtttgagtgcttctgatgaacttaaaacaatagcaagttttgctcctaagcaattttattttatattatcaaaaaataacgcatatagcagtcttatggctgaactaaatgaggcaatgcttgatattgaagccgccgacccatactttacgggaaagctttataataaatattttgtttcagacgataaaaaaataaaactttcagatgaggaactggaatatattaaggtagccggtccgatacgggtaggagttgatacaagccgtccgccttttgaatacaaaaataaaaataccggagaactgaaagggatctctatagagttattgaattatatatcagaaaaaacaaatcttcattttatatttaaagaagcaaaaaatcaggacgaattatataaaatggtcaaagacggcactgtcgacataatagcagaaatgaattatgactatgataccgctagagaaaacgggctcgcaatgtcgcgtccttatacctcaagtcagtatcttctgattatgggagataatcagagtcaggaaaatattgtaggaaaacggcttgcgcttcctaaatattctttatacaagggagagaccattggaaaagttacgtggtatgattctgtttatgactgcctgattgcggtaaaaaacggcagagaagactacacttatataaactctctgaccgccgaatattatctcagccagcccggatatgaaaacttgaatatgatacctcaaacatatacgcctgcagtttcttgttttggatttcataaacccgtaaacaaaaccctgctgagcataatgaataaattaatactgacaatatctgaaaacgagcttcaggccataataaatattaacacaatacagcaaagagattataactttgaatattatatttcaaaatatcctatacagataatttccggtatagccggtatatttttaattataatgcttctgctgataataatactggttcagcgcaacagacgaaataaagaaatgcagatagaccttcaaaagcacctcagcttatattcagtttctaacgactatttttttgaatatgactttaagaaaaacaaaatggtattcaacaatcctgatttaagcagacaagatgattcaaaactgatagaatacatttttaatgacgcagaccatgagatgtcagagaaaaaaatggaaggccgagacgcttttctaaatataatacaaagcggcaaagacggagttattgaagcgcaaatatattgctttgacgagaacctgcactggctgcgcataacgatggaaaccatacgcgacgataatggaatgcctctctatgctgtaggcagaatcaatataatcgacgaagagaaaaatgcagaagaaagtttgcttgaccaagcacagcgcgacagcctgactcatatctataacaacgaaacaagccgaagactgatttctaaaagtttgaccgaactaaccgaagccgatatgagcgccctgctgattttagatcttgacaattttaaaaatatcaatgacacatacggtcatctatggggagataaaatgcttcgcgcagttgccgatttactgaaaaacagttttcgttccaacgatatagtcgcacgtcccggcggagatgaatttttggtttacatgagcaagataagggatacaaaatcacttgctgaaaaatgcgcttccctgtgcagttcagttcacaatataaaacttgatgacagcaatcacttaaccataagcatgggtgtagcggtcgcaagagccggaatgtattatgacgttttatatcagactgccgaccaggcactttacaggtcaaaaaattcaggacgggataaatttgaaatagtggagtagggcacatattagacgccatataaataagataattgtataaaagaattatattttaacttgattttaaatgagcccggtataataccgggctcattccttttattttaataatattatattgttttattttataatatttttcatgtctgccacatctatttaccgccccaatatcatatctacaattagacaaaaatgataaagtcaagtaaaataaataaattctatagtaaacagtatttttagtgaactgcggcagggcaaactttgtttgccgcgttaggtgagccatcatctcacgcaaagcgtgaacatacttagaacagattgtattaatcctttttgattacatgttttcccatgactgcgcgcctaacgcggcgtacttcatacgcattgcgtattcatattattgacattgtaggtaaatcaaaacaagttattttgtatcacacccaccatactggtggggtcacagacattgtaggttatcaaaacatgttactttgaataacatccaccttttcaggtggagtcatacctaccgatgtttgctacaccacattttatataactttttatttaaaatattttcatatgctgagcttttagtgaacatcggtaggtgtgaccacacttttaaaaaaagtgtgtgtaatacatactaacttgttttgccattacatgcaatgtcattagtatgtatactcaatgcagacaacgtctgtctcgttaggtgagccaccatctcacgcgtagcgtgaacatacttggaaaaaattatattaatcctttttgattacaaatttctccgtggctgcacgcctaacgcggcagagtgtaaccacagccctaccatagttcgccatgtgaaaaccttaacagttctgttcattatattgtgacctctacataaatgactatataatttattactttattaaaaaaatataaataactcttgacaagcttaactgtaactgttataatcacagtataatctgtaattaatttagttacagattaaattttaggaggtgctttatatgaaatatgacgctgtaattatcggattcggcaaaggcggtaaaacacttgccgggaaactcgccaaaacaggaaagagtgttgctcttattgagaaagatccaaacatgtacggcggaacatgtataaacgttggatgtattccatccaaatccctaatacacagtgccgcttctgccaatccatatggagacgcagctgaaaaagcaaaaaaatatcgtgaagctatagaagaaaaacgaagattgaccaaaatgcttagaacaaaaaattatgataaattggcttcctctcctaacataacaatttataacggcacagcccgatttgcagaaagatctaagattgaagttaaaaccggcggcaaatctattatcattgagggagataaaatatttatcaataccggttcgacgccacgcatacctcctataagcggcctatcaacaacatccggaatatacacaagtgcggaacttatggatttagataatttcccggaaaagctcacaataatcggcggcggatatatcggtttggaatttgcctcaatgttcagcggtttcggcagtgatgttaccgtgattcaagacggtgaaacgtttttgccccgtgaagatgaggatatagccggagaaataaaagctattcttgaaaagagcggcgtaaaattcagacttggagccaaaattaaatatgttgatgaaggacccaaagtggtttttgaatggaataaacaagattacagtctcgaatccgacgcagttcttgcagcaaccggacgtattcccaacacttccgaactcaactgtcaggcggcgggcatagagttaacccccggacaagctgtcaaggtcaaccaaaatcttcgtactacagcagaaaacgtttgggctatgggagacgtgaccggcggacttcagcacacatatatatcccttgatgattcaagaatagtatggtctcaattgtcaggctcaggaaattatacagctgacagcagaaggaatgttccatacagcgtatttttatcaactccgtattcaagagttggtatgaacgaaaaagaagcgcaaaaatccggcatagattatatcaccgcagcacttccggtttcagctattccaaaagctcaggttctcaaatccactgacggtatactaaaagcgctgatagacaaaaatacaaataagatattgggagctatgctgttatgcgctgaatcctatgaggttataaacattatcaaactggctatggatatggacgcggattacaccgttctgcgggaccgtatatttacgcacccaactatggcagaagctttaaacgaccttttcactttatgacaaaataaaggattgactaatccgcagtatctataaaccgtatatcaacgtctcttaaagagatgtaaaatactataattttattataagaggaggtaaaacatgaaacgtaaaataataatttgtttcattttaacagctataactcttctatcctcatgcgccgcaaaaagtgtaggcattattccttcctctgaaactcctgattctgccgccggagcgtaccacaaaatctcatccgaagaagcgaaaatcatgatggagagcggcggagttactgttgttgatgtaagaagaccggaagaatacgcagaaaaacatatccccggagcaatacttgtgtcaaatgaaactattgcagaaaaatcagacgaaatgctccctgacaaagaggcggttctacttatatactgccgcacaggagtgagaagtaaacaggcctctgataaactgataaaactaggttataaaaatgtttatgactttggcggtatagcagactggcaatacgaaacggaaagcggtgtgacagaatgaacagtgaatttattgtagcagtacacgcaatggtatttcttcatcataaagcggacactttgtccagcgaaacacttgccgaaaacgtctgcacaaaccctgtgagaatacgtcgagtgcttgcgaaactgaaaaaggccggactggttgaaactcgcgaaggcagaacagccggtggatattcatatcaaaagactaggcaagtaaccttggggcagatagcaaaggctttaaatgtaaagtttgccgacactacctggcacagcggcaacaaggaaatgaactgtcaggtagcgtccggtatggcaggatatatcgacaatctctattcaagtctgaatcatctctgcgacgaatatttagatacgataaccattgcggacgtggaaagagaattatttaaaaaggaataatttgaaggcatgatatttatatttttcactttgcctatatgtgatataaaataaatgcagacgcagaaaactatttagaaaattgccggcagactgttttatttataccatgatgatagtctaaggtatataaaaaaatattttaaaaaaataaattataaaaatacggtttagtaagcatcggagggcaaacgcagtttgccgcgttaggcgcgcagtcgcggaaaagacaaatataaaaagaattataacaaactgttccaaatatgttcacgctacgcgtgagatggctgttcacctaacgaggcagacgttgtctgccctgccgcagttcactaaaatacagtgtattttaaatattaactcttaaaactataaataaaatgcggtttatcaagcatcggagggcaaacgcagtttgccacgttaggcgcgcagtcttgggaccgttttatataaaacggattataacaaactgttccaaatatgttcacgctacgcgtgagatgtctgctcacctaacgagacgcgcaagcgcgtccttccgatgttcactaaaaaactccgcatataagaaaataattaaatattttaaagttatataaaatgcggtttagcaagcatcaccgtgatgcaactgtgaccacatccttgcgatgtttactaaaaacctcatatataagaaaatattttaaataaaatttaatttttacactgtttctagacatattattttaattcaaatcaattaaactgtttgcaataaacgttaagtgtactattattttaaatgaataaaaagttatataaattacttacggaaaaaattttttaaagttaattatcattgttaaataataaataaaatatattaaaaaggagattattaaaatgaaacttaaagataaaacagctattataacaggggcgtcaagaggtataggctttgcagttgcggaatcttttgtgagagaaggagccaaagttgcggtttgcggcagccggttatcttctgcacaaaaagcagttgataaactaaaagaatcatacccggaagcagaattgattcccataggcgttgatatttccagcagtgattctatagctgaaatggttaaaaccgttttggcgcagtgggacaaaatagatatattggtgaataacgcaggggtgacctcggcaaaacatatatttgaaatgtcagatgaagattttgattcggttataaggataaacctatcaggtccgttcaagtgcataagagaagttgccgctgttatgaaagagcacggcggcggcagtatcataaacaccagttctatggtcggcagttacggcggcaagatgcagacagcttactcctcctcaaagtttggcataaacgggctaaccaaatcatgcgccaaagaactcggtcagtatgatatccgggttaacgcagtggcgcccggcgtggtattaaccgatatggtagcccattcggtaaacgaccaaatgatggacggtatgcgccggattacacctctcggacgggcggcggaaccgaacgagcttgccggcgcctatgtatatcttgcctctgatgattcgacatttacaaccggaactatcatacatgttgacggaggactggttatgtaatttagtatttgctgtttggataattaattatatacttctattgctcagacatttcagttaataatttcagtcaaacatctctgtcaggaaccttatgcaaacatctttgtcggtcacctcggtcaggaacctcatgcaaacatctctgtcagtcacctcggtcaggattctcagtcaggaaccccaaacagtcacctcggtcaggcgcctcgttcaagcttctccgtcagacaactctgtcggacgtctcattcggacattattgtcagccagacttgcaagtttttatcgattttaatttttatataaaacaaaagccggacaatatgtccggcttatttttattttatcttattgtcaggcagtatcggtttacctcctcctttgacagttggttttcccctgtcaagataaaaactaaattcagcatactcgccttcaacactttttacctttatatccttgccgtgggcgctgagcatactctttacaatataaagacctatgccggtgccctctttgtttatacttctagacttatccaccttgtataatctttcaaatataattttttgctgttcttccggtattcccacaccggtattatgaactgatataaacacttcgctgcctttaggacatgtggttattgttattgttccacggtcataagtgaactttattgcgttatctataagatttgttataaccatttttatcttatcagcgtcagctcggacataacaaacatcattatcaaaaaccaaatcaatatttaagtttttcttatctattttaggaccgagaccgattataataaggcggataacctcatttatatcaaaatctgattttacgatattcaccttatccgactgcattcttgttatatccaagaaagtattaaccagtctggacagcctcgtcacctcatctttgacgatgctcaaatactccttctgcttctcaggcggtatagtatcgtctaaaataccgtcaataaatccgcctatggttgtcataggggttctgagttcatgagaaacatcggaaataaaactcattcttatatcctcagacttttcaagttcgtcagccatgttattgaacgcgtcagcaagttctgttatctcagtcacgttctcgtccaccctgtctatagcaactcgtgatgttaaatcaccgccggcaaaatcgctggcgctcttactgactctttttatcgggttagccaaaatcctggaaagcatataagaaagaataaacgaaaccactataaccacaagagccgaaaataaaaggattttaaacagctcaaaaagcatgctcctcctttgcggtatcggcgtgcttaccagcacagcgccataaaccgctttgttttttcctcttataacaggaacttccagggtgaacatcgtttcattgaaagcaccattcatggttcctacaacggttacacgcttgccggacaatacctcacgcagatgatctagctctaatgattctcttgactcgttcgcccagtaaccgctttcagtagtgttaactatcaccctgccgtcaacgtccgtgattataatatgactgctgctgctcctggaaaaaccatttaaaaccgagttcagattctcctgcgatatgccgttgtttattaaactcactatcgattcagcatttttggcgagtgtgctctcgttttgttttgaaatataattgctcatcagaaccatttgaagcgacgccaaaatgattattccgataagaaccgtagataaatttgtgaacaatacccttgaaaatatagttttgccaaacaattagctcacctcaaatttatatcctactccccaaaccgttttcagcgcccaggttctgttttcgccctcaagtttttccctgatacgctttatatgaacatcaactgttctggaatccccaaagaactcatagccccatatctcgtcgaggagctggtcccttgtgaataccttattggtatttttagcgagaaaatataaaagttcaaactccttaggcggcatctcaacctttttgtcgtcgatataaacttcataagtagactggtttattttcaaaccgtcaaaactaagctcgtcctcgtccgccttttcatcaactgagtctgcacttcttctgagaaccgctcttattctggctataagctccttcggctcaaacggcttgaccacataatcatccgcgccaagttcgagacccaagaccttgtcaaaagtctcgcctttggcagtaagcataattatcggaaccttactctgcgctctgatttcacggcatacctgccagccgtcctttattggcagcataatatcgagaagaattaaatccggtttctccttattaaatttcgccacggcttcctgtccgtcattggctataatggcgtcaaagccttccttttcgatatatagacgcacaagctcacatatgttttcctcatcgtctactattaaaattttgggtttattttccataacaaacacctccgcatttaattctaatcaaattttaagtatctataaaatttatagtataaatacttttactctatttcaatattatagcacaagttttcacaaatgtctaaataatttatgaacaatataaaaatattttataaaagtttggcgtttcgggaaaactagattaaacaactatgtaaggaggaaaatataaatatgagccacgcaaaatcagcagccgtaactgcaaacagaatggtaaaagcaaacagctcggttaaagtcaagcccgacaaaaaaattttaaaacatgagcaggcggcgtattcaagacttagggctgaagctctcgacgctttggacgatttcaggcgctgtcagaacaactttgattttatttgtgaagacaagctaatagacgtatgtatatatgatatccaaaaaacaatgagccgatacgaatatttggtttgtgaactaaaaagaataaacggcggcagccgctagaattatttattgatttataattagaattatttgttaatttacaatactgtatttgattttctcctaattaaaatttaaagcgtccggattataaacttcggacgctttgtatttttaatatcagtctgtctccgggctttgcccttgacataacaaacggctagcggtataattatttagtatcgctttggttatcccagggcggcaattaaaaataaaatgttgtttaaacgataaatatatgaggtgataaaatgaaatatgttgttgttttggcagacggagcggctgacacacctgtaaaggagcttaacggacaaacgccgcttgaagctgcaaataaacctactatcgacagccttgcaaggcacagcgaagtcggtatggttaaaacggtcccgaataatcttcctcccggaagcgatgttgcgaatctagcagtatttggatacgaccctcaaaaatactatacagggcgttctccgctggaggctgtatctatgaacgttccgcttgaactcactgataccacattcagaaccaatcttgttacattatcggacgcggagaattacgaagataaagtaatggttgactacagctcagacgaaatttctactgatgaagcccgagagcttataaaatacgtcaatgaaaaacttggctgtgacgaatacgagtttttcggcggattcagttacaggcacctgatggtttggcacaataaagagaataatttcagccttaccccaccgcatgacatatccgaccgggtaatcggtgaatatctgccgaaggatgagaccatacttaatttaatgaaaaaaagttatgatattttaaaagaccaccctattaataaagaaagagaagcaagaggattgcaccctgcaaactctatttggatatggggaaacggaaccaagccaaatcttgacacatacaaggaaagatttggaataaaaggcgcggtagtctcggcggttgaccttattaagggtataggttactgtgccggacttgacgttttagaggttgaaggtgcaacaggaaatgtaaacacaaactttgacggcaaagcagaagccgcaattaacgcccttaaaggcgataatgatttcgtgtatattcatcttgaagctcctgatgaagccggacaccgtcatgagatagaaaacaaggttaaggctattgaacttattgaccaaaaaatagtcgcgcctgttttggattatttggttaacagcggcgaagatttttctatccttgttatgcctgaccaccctacgcctcttgccaccaggacgcattcttcagagcctattccttatcttttgtattccagcaaaaataagattatcgacagcggatgttcaagatatactgaagaagaagccaaaaagaccggtatatttaatgaaaacgggtacacacttataaataaactgtttgaaaaataaaacttgcatttattgacactttctgttattatatctttgtgtgcttactcagcaacagttttactaaataagagcaaagagccggatttttattctccatctctcagcccttaattattcaaggagtgattattatgccaacaaaagtcgtgattggtgcccaatggggagacgaaggcaagggaaagacaattgatatactggccggaaaggctgacgtcgttgtcagaacttcaggcggcaacaatgcgggtcatacgttaaaggttgacgatgttacatataagcttcatgttatgccgtcaggaatactttatccggatactcttaatattatcggatgcggcgtcgttgttgaccctaaggttttgcttgaggagattgacgggtttgagtctaaaggaatcagcaccaaaaacctaatgatagattccagggctcatgttatcatgccgtatcatattgaacttgacggtttgtcagagattgcccgcggtaaaggcgatattggcaccaccaaaaagggtatcggaccatgttatatggataaagctgaaagatgcggtatccgtatgagcgaccttattgacaaagaaaaattcagtgaaaaggttagagaaaatctggctataaaaaacaagatgatagagctcgtttatgggggaacacctcttgacgcagacgctattataaacgaatataacgagtatgctgacaggctccgcggttatgtatgcgatactataccaatactttatgaagctgttgaaagcgacaaagaagtattgtttgaaggcgctcagggtatacttcttgacatcgatatcggaacatatccctatgtcacttcatcacatccgatttccggcggcgtatgcgtcggcagcggtatcggcccgaaagctatagacgagtgtatcggaatactaaaaggctacacaacaagggtaggaaacggtccgtttccgacagagcttgacgatgcggtaggcgaagctataagacaaaagggatttgagtttggaacaacaaccggacgtccgcgccgcacaggatggtttgacgctgttatagccaggtatgctgttcgcacaagctcgctgacctcaattgtgtttaataaaattgaccctctcggcggtcttgacaaaatcaaactttgtgttgcgtatgacaaaaacggtgaaataaccaaagacttccctccaactcttgaagagcttgcagagtgcaagcctgtatatgaggaaatggatggctggaaagaggacatcagcaatattaaagagtttgacaaattgcctgaagccgcaaagaagtatattcttagagttgaagaattaataggctgtaagattacttctatcggtgtaggccccggaagagatcaaaatatagaaaggtaggttatgttaatggcagctgctaccaataaagaaaatgaagagaaaaagacggatgtaaagcctaaaaagaaaacaacaaaaaagaaggttcaggaaaccggtaacgaatatcttgattacaaaggcaagaaacttgtcagagtaggcaacgagatatactacggcaatcctgatgaaccatatatagttaccttccgtcttgaagacagcgaggacttgatggacttatcaatatccaaaagggttataatagagcttaagaccaacgagggaaaagcttcaaagctgattcgccaggcagagcgcgacggattatataaggcttttgatattggaatgttttggcttgaccaggctttagaatcaaataaataactataaaaaaactgatgaagcgtttaactgcttcatcagtttttattttgtacattagttttctcagtttcaacgagccggctatggaaaggttaaaacggacagaaaaattaaaattatgtataataaaaataaataaaaattatatacaaatgtggtcacaagcctgccggtattcattataaacatcgtatattaaatagttattaaaaaatatgatttgcaagcttctttagacgcgcagtctcggaatagattttataaaaggattatgtcaaatgttataagtatgttcgcgcttcgcgtgagatggttgctcacctaacgcggtgtgcttacgcacaccctaccgatgttcaccaaaaaatactgttttgaagatattaatttctaaaaatttcttataaaaaatgtgatttagcaagcttcggagggctgtgaccacacttttttaaagtgtgtgtgatacaaatcactttgtattaataaacctacaatttcaataatcaaacttagttgtgatgtgcaaacgtagtttgcctcgttaggcgcgcagtctcggaatagattttataaaaggattatgtcaaatgttattagtatattcacgcttcgcgtgagataattgttcacctaacgaggtgtgcttatgcacaatacatcacaactaagtaatttaatgacattgaaggctataataaaacaagttactttgtatcacaccaacctttacaggtcgggtcacaccctaccgatgttcactattaacatcttatgttagtattaattatataattattaaattataaaaatatagttttgcaagcttcggagggcaaacgtagtttgcctcgttaggtgcgcagtcgcggaatagattttataaaagaattatgacaaatgttataagtatgttcacgctttgcgtgagatgattgttcacctaacgcggcagacgttgtctgccctaccgatgttcactattaacaccgtatgttacatattaattatttaatatataattttaaaaatactgttttgcaagcttcggagggcaaacgtagtttgcctcgttaggcgcgcagtcgcggaatagattttataaaaggattatgtcaaatgttattagtatattcacgcttcgcgtgagatggttgctcacctaacgagatgtgcttacgcacatcctaccgatgttcaccaaaaatactgttttgaatatattaattcctaaaaatttcttataaagaatgtaatttgcaagctttgacatggctgtgaccacactttttaagaaaagtgtggtcacacctaacgatgttcactattaacaccgtatgttagatattaattatataataaattataaaaatacagtatctaaattatatcaaattcatttttataattcaggtatgaagtattcattattattatcataccatacgggtacgccgtctactatttcgccgtcatcaaacatttccaaaattattccttttcctggattccagttatcaggctccatagcggcattatttttcttatcaaaaccggatgaaacatattttttgtcattcaaatacttatatctgcaatcttcaatatattcataactcgaatatacgccttcaagataattcccgtctaaatcacggctgctcatttccatgaaacgggcgttctcctttttactgccgcccatgtccgcaaaacggtcttctcccactgctatatggtcgcccatataacatttataaaatacagaaattgctccctgcttccacggtctgcctaatttaactttgccgctgttttccagctgtgataactcatcatcaccgtttaagcggcagcaataaaacaggaagcccctggtctgctgttccgaatgcgatccggcgattatatatcccccatttggatatgcgcggctttgaatattgcagtgattaaacactgcgtttgcatctccgaatataaaatctacagttccctcaatatatgacaaaagaaaatagcatctggctttatccttaatatatagtgtgtcctgccgccctataaaacggcagttgttaaagaaacttctgtccgccgaacatctgactgccacagcctgggtctgcgcgtctttgctttcgctcacagtcacatcagcctttctggctttggcggattggtaccaagcttcattgcgctttttagtatccaaattttctttcagcaaaacgtctgtttcactgacaggctcatatatatcctcctgctcttcgtcagacttgtaaatattatatgagttttcaaacgttatattttgagctataaaatcatgcgcattttctgtaatcgtaacgctggcgctgttttgcgttcccacaccgcttatatatccgtcagatttgacatatggctttccgttcagcaatgactttttgctttcatactcctttaccaattttgcaaattcttcatcaggagaacaatcagccggatattccatttcagggcttaaattatcatagcttttataatttcttgaagctccgtaataaaaagtcaataaaacctcattcggcaggtctctgtattcaggatttttttcaaacgtcaaaaatggcttgtctatccaaattctttcacgatacgttccgggacttatgtatatatacactctgttttcttcactgtcagcttcaggcgctgcccggagagcttctgaaaccgttttgtacaaaccaaattcagggaaggatttctctatggctccgtcaacctgaattagtgtattctcagaactttcaaacatacttaaaacatggacagcatcacagcgccttggagtatcgccaaaaaaagacaccattgaaggcttttgaaacgcacggtaacaaatagtgccgatatccataaaatcaacatatttgtcaggttcaaaagaaccgttttcgttccccttaataatcttgttctgataagcaattttgacatagggatagaaccagtcgtcctcactcacatcagaaaattcaggttccgcccctcccgaaatctctgttttttcggctgccagcaccgccattttaaccaactctgcccgagtaactctctctaacggctcaaatctgccaaagccatcgccttctataacgcctttgctttgccaatactcaatatcgctgacaaacgttgtgttattatcataaatatcattaaacacgccgttatcttcaatatcgccggaagcgcaaaccgctaaactttgaaaaataataaatacaaccgctgttaacagaattgtctttttcataaaacacactccctgcccttttataaattaactaatttaaaatattctaacacttccaccaaattaattttttctttattctgcttaaagctccgcgtcccctttgaactatggattctctttccatgcagggcaggctgataagcagtccgcagatattcttggccgctttttggagttctcccaaggtcaaatcgccggagcctatagccctaatggtattgtcctttccgctgttatgctccggatcgttaactaccatataaatatcggtgcctgacctgagcattgcggctgtattttcctttgtcgccacatgactgccaatctcattcatacttgcccaccagtcagtcattattactccgctatatccaaactcgtttcttattattgtagtggttaaatcgtaattcgagccgcaccactgcccgttcaacggattataagacgtcattatagccgtaggctttgagcattctaaggcatattccaacccttttaaatatatttcccttactgctctctcagagactacagaattaacacgcttcctctttgtctcctgattgtttgccgccaaatgtttcagcgttcccataacgcccttatcactcagaccatttattgccgcccccgccataactccgcttatatatgggtcttcggaataatattcaaagttccttccgcacagcgggtttctgtggatattcatacccggccctagcaacaggtcaatatcatttgccagcatctcgccgccaatacatttataaacctctctaaccagcggtgtgttccaggtgcacgcaagcattgttcctatcggaaccagcgacgccgcgtcaccattgtcgaacctgagcccggacgggccgtcggttccggcggccaccggaattccaaaatccaaaagcctgcttgaaacgccgccaaacgcacatcccgtcccgggtcttactctcttgcttcccattccctcgccgcggactaaacaagccaaatcctcaatagtgagctgacctataaacttatccatgctcacttttccgttcttaacatccgcaagtttatatcccttatcaatagtgagttcaactctgtcaggaaggttgtcctctatcctttttctgatatcataatctctttgcggtacgtttacatagtcgtacccgcctccgggctttcccttcatacatgtaaacttttggtgcggagccagtgctgaaacacattttttaactatcttagtttcattaagcttaaaagaaaaagtgcagaactccgggtctctgacatttttacctatcagaaccttatactcgcccttttccagacaatagcagaacctattgtccgcccctgtatgtcctgaatcatcaaatgaagacatacggctcataggaaacgaaaccgtctttttatgactttctccgggcagcaatgtttttgttttataaaacgccgccagctgcattttaggcttattgattttcccttcgggcggagtaaaataaacctgaacaacctccttgcccgaaactttgccgacgttttttactgccgtctcaaactttactatatcgttttcaattctgaaatcagcacatgttattttaaaatccgtatacgacaagccaaaaccaaacggatactttaccttctcctttgcaaaggtttcaaaatatctgtatccaacataaatatcctctctatacacattttcttccttgctgccaaaattatcagacgacggataatcagtataattattcgctattgtgtcagtcagtctgccgctggggcacttatcaccgcagagtatgtcggcaacggcttctccgccctcctgacctccctgccaaatatataaaacactgtcgatattatactcgtcgacccatttcatatctattatgtttgacgtgttaagcagaacaaccgtcttatcaaaaacatcagtgacgtttttcagcattaaatgctcctgctgggtaaggcggtaactgccttcgccgttaaaattgtcctgctcttctcctgctgttctgccgataatgattaaagcagtctcggaatgctctgctgccttagcggcaatttcactcgtcactgtcatctctttctgaaaatgaggtctcgcggcccacacgcccaggcctgttgaaataggattattttttatccattcttcatacacagccgccaactcttcgtttacctttattttcaatttttttctcagactgtttaatatgtcagccacatataaaacattaacgcttccgcccgagccggttccgccggtgttataatccagctggctcctgccgaaaaccgatattttcgttccggattttaaaggcagcacgccattttcatttttaagaagaacaattccctccgcagctgctttttgtgacgcatgcgacgtctttataagatttatattatttaatccttggtcaaaatcaatttttttcagcatatttctcaccctttgttaacttttgctatttggataattatatattattatataaattgtgtcaattaatttaaacctctaattacaaacaaattttactaaaaaaagactgcccgttttaaagagcagtctctgcaataattacttaaattaataattgttcaattgtcagatattcaatcatcagcgcttattctattaccatccaaactgtttgaaccttgccgtttctgtcgccgaatgcgagccacattgtattaacctcatcatcaatctgcggcacaacataaggagctatagttaaagacgtgtcataaccgtttgagtctaccctgccgaaacggctgtaaacgatttcattttctctctgaacaaaaacatcgtctgtggtattcaagatacgctgaactttatgttttataacatcataaccgtcaatatcctgcggacctgttatcacataagaagattcgtccaaaactttatatttcaggtcttcatgtccgataggcgtatgatccattattctcatagtaccgagcgaatactcacccgattcaacaatatatcttacaaccctggctgtattcttatctatagggctatctgtcggaataggattttccgttgctgacggcggttcagtcgccggggcttcagtaggttcgggttttgtttctccgccgtttattattgtatctattatttcactgtctatagttttagcgtcgccaaccgcaaatgttccggtgccgcttgcttccgctgtatcgcagactgttaagccgtatattatcgactgagctgtaaccgtcacattagactcaggagcgtaaatcataccgtgaacaacagacgttcctgaaaacttcatatcaccggttgaataaatgtttccgttaaagtctatattgctgacgttcacctttttagacaatgaaataatattacaggatatctttgcaaagttagaaagatttaaaacgtttcctgtatatacgaatgtcaagctgtcgggatttccataaacgctgtttgttgcatttattaaagagttagaattaggataacctccgccgccgaaaatgtcgtttgtatagattataactctgcctccgccttgaattttcaaagctcctttaaagttaaccttttccgctcttataattcttatctcgccttcaggaacatatatgttcatatcaagagtatcacttattgtcagttcattaaaatatgaattttcagaaagtgtataattagactgataagtatcgttgttcccccaagagctttggctccaccctatagttacattgcgcgttccgtcattatatttgctgccttcaaaaaattcgcttcccgggatattgtccgtatcaaacctaaaagcttcaaaggaagtattatcaggaacatagggttcgatattggccaattccttaacatcattattttttaaatcaatttctgcgccttcgccaatcattagtttatctgctaaagctctgccgtctatataccagttatccttaccgccgtttgcataaaacggaccgtttttcacatatgcagtaccgccgtagattgagccgctcgcaataaaccgagcctcgttttcaacataaagcggacatttgctgtctgtcccgggaatatcatttgttacgcttgctgcaaagactgaggtgactgaaaacatagagataccgagaacaattgttaaaacaatacacaataatttcttcataatttccatctccttataaaacaatcatattaatattattacctgtaataaagctgataaacactttattgtggacatttaaaaagctgcaatattgtgagcgtttttgctcaaacattgcagctagacaatcatacttcaaaaacagaaacttagactcttaactttgcgtcagaaactttcatttcctttgccaaatattagattaatttaataattataatgggaaataacccattctttattacattttgattttatcacacataaaaaccattgtcaatactttttttacaacttttttccagttttttcttatttgttaatttattataactgcggcggtttcgccgtcccattgaacatcgtttccaaaagcttcggaaactgctctgagcggaacataggttttgtctgctgtcaacctccctgcttcgctcagggtaatggcctcaccatttctgtaaagaatgctgcttccaatctgaattgaaatagttattccatcttttgaagcaatcgcagtgctgctggtttcatcccagtctacatcagcgcccagcatttcaaacaccgctctcataggaaccaaggtggttgaattattcacaacaaaagccatagggtcaaaattaacgttatttccgccgtatattacattaacaatttgataaaacgggatttcattgttattagcatatttcattacagaagaatgttcattcccggctatcgccgcctgtgaagctccttcaaaaacgtctttatcaaactttgtatcattgccgtaaaatgccgcaagttctagattagtgcagtttttaaaagcatttttacctactgctcttgtattttcgggcagaattattttaaccatagacgaacatctataaaaggcgagctctcctacttcttccacccctaaaatatttatatcgtagagcttctcacagccaaaaaacgctttatcccctatttcctttatatttcctatagttattcctgtcaaaattttattatccataaaagcggattcttcaatttctgcaatattttcaggaacagtatattcagcgtttccctttccgggcggatatgaaaccaaactgttttcttctgtatcaaacagcacgccgtcaaacgacttatatttattatttgaagaattaacagttatagattctaatgaatagcaccaaagaaaagctttgctgtctatatcgttaacatttgccggaatctcaattgtttccaaagatttacaccaggcaaaagcctcagaatcaattgtcttaagattatcagacaaggttatactctttagattagaacaccagccgaatgcgtcaacacctattctggcaaccgtactcggaagaacaattgaagtcacgttttcacaccagcttaaagcataatcgccaatcccggtaacaccttctgatatattgatattcttaatctctttagaatatgacttccatggtattgaaaccaaatctttaaaatcattaatatcaccgtttcccgaaattgacaaagtctgactgccggagtcatattcccagctaacgcctgagctgaaaacccctgatgtttcagccgcaaaaattgaaaccggaatcacagagaaacataaaattaaacttaagcatactgccataatctttttcatgtcattcactgcccttcttttgtagttttaaatttttattaagtattattattaattttatacctgacggcagatgttgtcaatataacaacaatatattacagactatttaacatcaaaccatacggacaaatattcattttcttcttccgcgtctgctaaaacacgaattaattttgcgcatagttttttattatcatttaaaaaatccgacatatttttaaaaacaatcataactctttcactgccgccgatatcggataaaacatcgcataaagcgtcaaagttatttccataataatcaggcgcgttcaggctctccgccaaacacttgtgcatagtttttttattctgcattggtccgcagtcgattactatttctttcatttgtcttatctcctatatattatgctcaatataaaactttgctaaacttcagagaacgtttcataatggtcgtttgtataatacacatgcccatcgctggaatacacgattctttccgctcctctatgtccgccgctgtaatttatatcgcactcaaagtattttactccttttttaaccggcaaagtctcctcatagtttgaatatctgtcgccgcctatacttttgcccggagcaacctcccataaatttccttttttgctgtcccagcccaaacttttggcttcggattttgttataaagtttcccggcagctttccatacttatgtatgtatcccgcgacctcttcttttgaactgtaatttccgtcctcacgaatatctatgcttttactcgtgctgtccaacaggttagactgagtcagagtacaggaactcagagcaaaacataaagaacatataattaaaactacagataataaaagagctgttttctgaaaaatttttcttttcatttaaaaatcctccgtttgtataatcagctgaatattatggatataaacgcgtttagaaatcccatgacaaatccaagcaaagctccgagccaaattatagcgtttaattcctttttcattattgaaaacagtaagtcttcaaactctttaatattgtatccgtttattttatcttcaacaattttcgcaatattcagtttttccatcaccttaggcaaatcattttttactgttctgatatatacagactgaaccgcggactttattttgggtattgagtgccaatatctttcagcaatttcactggtatttgtgtccataatcctgccggtctcattttttattaagtcgcctactattgcctccgaattttcagaaaccattttgtcaatggtctttccaataggttccgccaggctgttaatcatattgtcatccaccaatttggcaaatgcggcttttatcctgcccttttctatatattgatttctgatattaactataacttttttcgatatctcagtaccaaaattaaattttgaaagttttgtatgtatgagagcggctatatcctcctctgctttttcggtcatattatcaaccaagtctttatcgagtttctgataaagctcctcacggacagtattctcactcagtttcattttattaaacagtttttccacaagcccagttatacctgatattataccgtccgacaaaagcgtcttgtttatggtatcgttgtccaaaagctcagtgctgacaactcctccgatagttttcgctatccgctctttttctttcggtatcaaaccgggcgtaaacggaacgcgccgcttgccgatatatacaggcttcagcggcctaaacagcatttttatcgcaatattgttagtaacatatccgataataagcccaataaccggtccgattaaaaattgtatattcattataattaccacttttcaataaggcgcactgcgccgccattcaacgttttcattggcaataaaaactgaccattaaaatattaagcgaacacgccgcatttgcggcggattacttcttaacttagttgtaaaaatattttatcatataattctaacaatatcaaggaaatttcttattgaaatttgtaaaaatttgtagtataatttgttttaattaaaaaggaggttgaattatgaaaaaaattataggcgagttcaaagaattcataatgcgcggaaacgtgctcgacttggcagtcggcgttataatcggcggagcgtttaagaccatcgttgattcactgacaaatgacataatttcaccgatactcggcttattcggaggtcttgatttttcaagcatggttttgtctatcggaggagttaacctcaaatatggttcatttattactgctataataaactttttaattatggccgtagttattttcatatttgttaaaatagttaacagtgtgataagtttcggaaaaaagaaacctgcagacgagcctgttacaaccaaagtgtgcccatactgctgcacagaaatagacataaatgcgacaaagtgtcctcattgtacatctgaactgatagaaattgaacctgaagctcaagagagcggggagcctgatgttatataactaattatagttatatagttaggtattatgacaaattgccatatgtatattcacgcttcgcgtgagatggcagctcacctagcgtggtgtgcaagcacaccctaccgatgttcactccaaaacaccgcatttgggataatagttttaaaataataaatcttatataatgtggttttgtaagcttcggtagggctgtgcccacactttttaagaaaagtgtgtgttatacatatgattttattttgctatagcctacagtgtcattattatgaatactcaatgaagatgaaatctgccgcgttaggcgcgcagtcccggcaatttttattttataacaaattattatatgtatattcacgcttcgcgtgagatggcggctcacctaatgcggtgtgctttgcacaccctaccgatgttcactcagaaacattggtttatatagacacgccgatttgtatcatactcacccaaagggtggaggtcacacccttccgatgttcaccccaaaacaccgcatttgggataatggttttaaaataaataatttattggctgacaaaatcaatattagtattaccgttgttatttgacacacttaaaattttgtcaccgccctttttgtccggcggcaaattgctttcccctttttttatattgctctcaacagaatattcatcataacttcctttaaccgaaccgtttatatctccgttttttgattttattattatactatttcccgcattaagcttatcaaatgttgtatttcctccgtttgcagaaatggatatagaatccgttacagttaaactcggcagcgttatatcaccgtttgacgttgacaaaaacaacgtttttaaaagcgcggcgggcagctgcacatatattttcctattgccggctgtcgtttttcctccaatataatccggccactctttactgtcttctgcattcatatgaagaaccttatcattggaaacaaaaatactgtaatactccttgtcactttcaaaatagtcaatatgtacttggttatcatttgaaaacgttatttttatttctctatcccgaacgtcaatatttaatcctgctatctctgctccatttgaagtatagtattttttctcaaaattatcctcgccgctctcagaacaacccattaaaagaattgctccaaatgttaaacacattataattactataacttttttcatataattcacttctttcattaaacttgtatttttaaacaacaatttcttttattccaataacgttataaaaaaataattgcagacttcattgcttttttacctccctcgttcttatcaaaataatttttgatttttatgattttatttgctataataaattataaacctttgtgttacacaaaagtcaagagaaagtgtgaaaaaaatgaaaaaatattttttaatcggagaagccgcaaaaatggttaatatgacaagcgagactctccgccattacgaccggattgatttagtgaaaccgagcaaatatgatgagcagacaaaataccgctgctatacacagcaggatattatacgtctgaacgcagttcgagcattgcagatgatggatttgcctttacagaaaattaaaactgttctggaatataacgaccttgaaaaaattattaaatttctgacagaagcagaaaagaacgccgatgaaaaaatagcggcgcttaaatacagcaaatcaaaaattcaattagctaaagcggactccgaaagaaaactgaaaggacggcaaaatattcaaaataattttgtatataatttccccgaacgtgtaattatgctttcagacactatggagacaccaacacttgataatctttggaactatctcagccatttttatgataaaattgagccgtcgctaaaagaacagtttgcgtttgaagatttggctggtatctatacggagaacggaatatcaagattattcgctgtatgtatacgccatgcggatatagaaggattaaaaattctgcccggcggtaaatatttgtgttcttattgtactgaagaaaacagaaaaatcattttagacaaacttatacaaacagccaacgaaaagtacaacataaagcctaagtttacaatacagcaaatagtggtgtccggtattttacaatggaattatcaggctcaaatatatttgggttaagaaatcaaactatataaaataatactttgacaagaataatcataaatctctaggcgctaaatttatttcacataatttaatcaaaaaggcaagcacattcttcttttgagcgtgcttgccttttcaatatattcatttttgacatccggttataaatcggttagttttcatcagtatttaaataacgctgtttatcaaaatgataacaattaaaaacatattgtaattcttaatatataaactacccttaatttttaataatcaaactgcttttaattctttaagattgctttgtttcttgctgttcagctatttaaatctcacttaaacaaactgttcaaaaacttcatctatgtattcaggttccaactgaatctcattgcatattcttacaatcttttttactacctcctcatccggagatatatccggcagaatactaatactttgcttaacacaattatttatttttatcgcataagaataatagcttcctatatcctcatgatagtatctttcttttaaatatgaatatctatagttttctctcattttttctcttgcctcgcatttttatcatctgtaatttcataaccggactcaattaaattatgaataaacacccctatatccatatcacatgcaatagttatatttataaaagtttcaagcatagttattcttttggagttctctaagtctatatattgtctgacggatatacagcatttttcagccatttgctcctggctcagattcagctccatacgctttgaatataacatttttcctatatttacttttatcaaattcaatgcattcccctccaatcgacaatatattcaatattttatcaatataatgattatacgtacatatgaactgtttcagataatttctaaattacagaaatttttaaacaataaacgcagattaacatgttcagcaaacttattaattatactttttaaatgataatcaatattttaacacttttggagagcaaataaataaatttgcactaatttttataccttttttatatattttacatcagcaaatatttatattattttaatataaactttattataaaattcatatttgagagccgcattctgacattaaaataaaacacagtatccggctacgttaaaaaattctaaacatcttagttaaaccaattttttgaaccaaatattttgttttaattatgatgaacttaaaaatcattccataccaattaatttcctagtgacaatataattattttaaatatgtttacattaaaaaaagcagggcttgattaccctgcttttagtctgtttagcaaatttttaaaatcattatgatcaaaaataataaaatgctaacataaaatttttaataaaactgaacctcccggttatctaaagtccaattgtaattcttcacatatgtattattactttcaatatcagtttcaacgaatccattttgaacataaaaagcacggttttgaatgtttaattcttgattaatactatgcttaaatactatatagttcagttttttacaattgtgaaacgcgtcgctttgtatctctccgattgacgcggggaaagttatgtttgaaagcgatgtgcatcccataaacgcctgaggtcctatacagccaagccctgttataagttttactgttttcaagttagtacaattcttaaacatggaatttcctagataagttacgccgcttccgatataaacgcccgctatatcttctaggtaacttttccaatatgaatttgcataatctctaaccgccccattgccataaacatataatacaccgtcatgcaatgaagcaaatacaccgccgacaggagtttgccaaccacttacatcccatgtttgagacggagaagactccatatattgaattgtcttatttgactttccataatttgtattaacaaaatccaattctaactgattgacaatcccatcctcgtttaaatcccctaaataaattttaagcggggtagcaatatctatattacagccgtttataactatgtcttttatttcatatgacgtgcatataggtctttcaaatttcacactatatataccgttcggcacattttcaaatataaaattccctatcgtatctgatttggattcaataagatttcctgtattatcatatagtgttattgttccggcaagacctcctaaatttccgctgattgagcctgataacggtgatccgccgcttgttatatttgtttctatgtctggatctgatattgatttaattgaactttctcttttataattattattaacaagaatcaagtcatctgcattaatttttccatctccattaacatcacctaaacaggtttcaaatgcttgagagatatccaaatcagaggttactggtatattagttattgtacagcataaacctcctgtccgctctgcttttatgctgtaggttcctggctgaacattttcaaattcaaacactcctgtcggagctgtgattgtatctattggattttcaaagtttgtgtcaatattatcatataattctattgtgtttggtaaagaagttccgttatatacaaatccgcttaagcggcaacctatatttgctgctgaagcagatatacccagcgccgaagtcagcattgcagctgtgagaaaaccgcatattattttttttattttcatttttgatgtctccttagttaaatttttatattttgggtcagatataaattaaccattggaatcaccgccgtttataaaaataatctagtttttctatagtatagcatacacgttttgtcgaaataaggtgaaacatatcagatgaaataaatttttaaaactttttcttttataaagtaacgtcttcaactaaaaggcatatatgtaaatcataattatttttatatattatttataataaacttttctgattaaaagatattcttctctcagactaacaacaaaataagttgcggatatcgccaccatttttaggtatgctgtacatttagccggacaaattttagttagactttttataacaagaatacatattttatatatactctatttaaaaattgactaaataaaactatagcaaaaaggggtgtgcggattccgcacatccctttacgaacgccccaaaaggacgtctgcacaaatataattgtgtaaaaaagttatatatattgagtcaagaaatatatatacataataaaaatatactgtgaactaatcaaatcttttaaaccgaaaaactgcggccggcttaattgtaaaatgacaagtgaataactcagcttcttattggctgctgaactattttcacttccgatttattctatacttaactgttatcttttctactgtcttctttgctaacagacacagtcacgaatttaatatcctcaagaagttgtttaagttcttccgcagcggctttagcttctgaaatactctcctgcatatggttcagtctttcaacagctttatcaatttcactgaaatcaacttttaagcgctttcctccgtcttcactgggttcaataaaaacatccaaatccactgtcacgcacctgctttatctttcgcttcttctattgtaacatataagtcattgatttgacaatgcaaaatttcagcaatatccgggagtttactcgcccgcggcattgccatgccggtctcccattttgtaacagtagatctttctattgaaagagcgtcggcaagttcctgctgcgttaaacccagcttttctctaaaagattttatactgttcaaatttatcacctctatcgtgcaatttattcacacccttattataagtgaaatttttgcacttgtcaatagtttttttggaaataagtggatttattgcacaccgccttgaaaggtgattaatattcacttataatagggtagaggtgataaaaatgaccgtgttaaaagaattgagaatttctatgaagaaaacacagaaggaagtcgccgattttcttggtgtcgacagaacaacttatgtcaaatatgaaaatggaaataccgaacctaatttagataatataaaaagacttgcggagtattttaacgtcactaccgattatctgcttggaaagtcagaacctcccgcctctgagtcttccgagtcaaaaaatgacaacggattaatattcagctttgaaggaaacaatgaaaaaatcgatctgacttccgaacagctgcaaagagtcagagaaatgctgagactggctatgcctgaacagtttgacaaaaatgacggtgcaaaaaatgaataattcttatggtctatacagaaatgttcgtaatgcttcatggaagtttctgattgacttcaatatatgcgagctgccaattgatgtttttaaaatctgcgaacagctaaacatacaaattaagtcatacgaagaactttcggagataatctcaataatcggtcagcaaggacgaactgttgatgaagagggtttttgtatgttattcgacaaaaactggtttatattttacaaaaacgattaccgttcgtatgcaaatataaattttgttattcttcacgagcttgcacatatcttattggggcataaaacgaggattgaaagcaataacggtaaaattctttacacaaacaaaaagaatatgaattcccagcttgaaaaagaagcggatatgtttgcaatccgtataatgtctcccgcatgcgttcttaaagaactcaacctccacactcctgaagaaattatggaagtgtgccgactgccatatatttatgcagaaaaacgcgctcagcgaattgaggaattatacaaacggaatatgttttataaacagccgctggaaataaaagttcgtgaacaattttcaccttttgtcagccgcctgaaaactaactggcagacagaatctatacaagaatttatatcacctgaaaaattttaatactttaaacccttaaactgagtaataattaatatatgaaagctgataataacctatgaggtgttatcagtggacaaatactttgattattatgataataaaagaactgcgtatcaaaaagctcttgaaattttataccggtataaaatttccaaactgcctatagacatatcacaactttgcaggttaatgggcgttcggctcggcagctataaaatatctgaaaatttaatagtaagcctgcgtcttgaaaattttatgattaacgacggttttacagcaataatcaatgattcatattacactttttttaattccgataaaacaaaaagacgtcattttacaatttcgcatgaacttggacatatagctatggggcatcttgaaacagaaaatttagcatgtatggacggcgtcacagtttggaaccgcagcgataaagctgagccaagcgacctggaaatgttcgctaacatttttgcctcaaccttactggcgcccgactgcgttttgtatgatacaaacattaatacgcagaaaaaacttatggaggttacagggctcgataatgaagaatcagaaaaaaagcttataaatctaaagaattttaatcaaaatcggtccataacatttcttgaaaaagcagtatattataattttcgtgactttattcaaagttttgaatagtgtatattgaaagtttaagtatttggtcaatcacaggtaggacttgacactcttctgtaagatgagcggcagctgtttatgttgatttgggcattggtgacttatggtgatttattatgctgccttgaaaaggcgaggctcacctcacgatgcagatttcatctgcactaccgttgttcactgtaaccgctttttatgagattttatatttcgttattatttaattgtaatacttatagttaaattgtaattattttttataatggctgcatatataagacgtgctatattaaatatataattattttataaaccattttaaattatttttttaattttcttacgactatctttaattctctaagatttttgtttaaaaagtaagtattaatttgtatatataagactgtcaaagcacttatgtccaattcacagcctgcacgctatattaaaatagcgtcaattatttgattttatttttatatatgatataattgtttcggggtgtgaaaaatgaattcaaaaatattgaaatatttatcatttatattaataataatcatcagcggcggtattttattatcaacatttgttttcattcgatttaatagtatagttcaaaattttgaaaacggaatattaatatattcattttttaccttatatatatgcgctgttatgttaccgatattgttcagaaaaaaattaaaaataagccggacaatacctttaattttgatattttgcattctttctgcagcacttattaacgcaggggcttacaatatagttaaaaattctgtttcagcatacagcagacaaaattgggataacaatgcaaatcttagaatttatatgattgaagatctcgaaaaacaataccagttttttggaaaaaccgaaacggaagtaattgattttcttggtcatccgtcaaatgtttcatattacagcggcaaaagattagaatactatattggagacggctatatagatccatatacatatgatatcataatcgaaaacgatgttgtttcaggtacggctatagtgcagcattaagataatagaatttatgcttaacccagccttgccaacttaaaacaatctgtcttataataaaatggataaaattttgatacataacttcaattggtttatcacctttaaattttagttcattaaatattaaaattatttttattacattattttctacctattaaatcatacagtattattttattacaacaaaacttttataatcagagccgcaatatatatcttatgtatatttctatacatttttcttatgatatttctcttttagattaatattttacaatatctattttatcgcaatgtataatactcttctgttattcgttttttataaatcaatatatatatttacatttatatttttatatgcaatagtatgaaacacatcgcacatttcatattatataatacttttatataatatttttattaatatttaccaataatttattaatatatttatctataattcaacattgtatttaaattaataatatgatatgatttttatggtaatcaatatttgacaatattttgtaatatttgaattatcaataaaaattaaaaggagaatgtacaaatgaaaaaagtacgaaagcatctaagtttacttttagcggcagccctgctgctcagcactgttattttacctattaactcttttgctgaagaaactattccgcaggaagaaacaaccattgatagctccattggtaaatccccaattccaacggcagaagacaatattttaactgccgaaacttccgttcagacggcagatccttctgttccaactgcggaaagcccgatactggaagaaaacaataacgccggcttaaatgatgagattccgccggattccgccggaacctgtgatgatattctgcccggcaaagttattgtcactctgaaacaaaattccgccggcaaatataaagcgccgttttcagttgatagtaaaaccgcagtattaaacagctctatttttgacaacattgatatagcggatattgagctgatttcacccgcgtctgaagaagacgaaataatgactttaagtgatgatacagcagactcgcccggtgatatattccttattgaattaaataatcaatccgaacaaggtgtttttgacgccattaagcagcttcaagcaaatgaagacgttctatgggcggaacccgactacatacaatatttctatgataccatacctaacgacgagttttacaatgaactgtggggaatggaaagaataaacgcaccgaaagcatgggataaatttaccggaagttcagatgttgttgtcggcgttatcgacggcggcgttgattataatcatcctgatttggctcccaatatgtgggtaaatgaagacgagattcccggcaatggtgttgatgatgatcataacggatatatagacgatattaacggctggaatttcactttcaatcataacgacccaatggatattgcctatcacggctcacatgtggccggcatcatcgccgctgccggaaacaatggaatcggcgtaaccggggttgcctggaaaacaaaaattgccgctctgaacgtagggattgatgaaaggagaatcagctcagcggcagttattaaagccattaactatgccacagataatcattttgatataataaacggaagtttcggaggaacttcaagcagccttgcccaaaaaacagctattgaaagattcccgggactattagttttcgccgctggaaatgaaggagttgacactgacgtagttccgaattatccatccggctttgaatgtgaaaacataatatctgtagctaattttgatgagagcggttctttaaacagcacctccaactatggtgttgtatcagtcgatattgccgctcccggcacaggtatttacagcactgttcccggcggagaatataaatatttaagcggaacttctatggctgctccatgtgttgcgggggctgccgccctgttaaaaggatataatccgagcttaaggggcgcagaattaaaagatataatcttatcttctgtatacacttcgtccgaatatgataaagtttccagcggaggccgccttgatctgacaaaccttctttcaacggcggacgggaccgcaaacgatggggttgtgaatcccggaaagcttgagtggtggacaacatccatagaatggagacaatattccggtatagatgaaaatgaaccgtattttcaaaagtgcagatttaacattgaaagtgttaacgttatatgcaaaaacaaaacttatactgtcccggcaaaaacattgaaatatgatgttatcgaagcaaattatgactatgagataaacagcagatacgagctctgcgccaaagttaactatgacggttccgcagaatactatcttgacccgggagaccgccagcttgaaatggggcaggataacaaagatattgcatattttgatgattatgcgcttatttggattgcagatgtttattccgaccaaaacggacaattgttttcagacagcgctaagcttattgttcctaactatacctggtggaataacagcgtaacctatgaccctgataataatctgaatgccgcttttaaaattgacagcatacaagtatatgcaaatggtaattattacaatgttccgtccgaaacaataaatttgagaccggcactttctgctcctcctctcagacctgagcgtgactattctctcggggtgcaaattaaaaacaacggcactgcggagtatggaatatatgcgccatgggcagaccgcgaaacaaaaggaccgatttataacaacgacggaattcttattcctatctttgattttaaatatgattcaaactatagccttatagtttcacagctttggtttaaaaacgatatctattatccaaatgacggaatcgtttatcctggaaaagattcgtggtgggaaacaaaaattgaatgggaaaaatactggatggatgaagaatactattatcccagctgtgaatttacccttgaaggcattgatgtaacttgtaaaaacaccaaatatactgtgccgggcaaaactttcgtataccgtgaggtcgccggaatcttcgattataacgcaaaaagcgaaaaatatcttgccgtaaaggttgactacaacggttcagcgtcatatcagctgtatgattacatcaatgaaaataacagcaacagtccagcggttgtatataatgattcatacgcggttatccccatttgccgggtattctcagacaaaaacggacagatgttttataaatctaaactcaataatttcacttacactaatgggcaaaatataacacagctattatttccgtcacaaattatgtccatgaaatttaaagacattgccgctgaacgtgaaaccgctgtcggtttaacatataacggcgaagtctatgtatggggagacggcgcatactatgacctgggtcagggacaggtaaagctgaatcaatatacgccgctgaaagttgaaggtcttcctgaaatcgttaaaattgccaaaggcaaacaccacgtactggctcttgatgtaaacggagaagtatggggctggggcaacaattccagcggtgaagttcatggtgcatataaaggcaaagtgtatgtgccttcaaaaatttcaggcctgaacaatataacggatatagcggcaggcaccggattcagcgccgctataaagagcgacggaactctctggacatggggcaacaacacagacggcaagttaggtgaccgcggaacaagcgcagcaaacgttcctgcgccggtaacaggtctcagcaacgtatcaaaagttacatgcggagagaaatttatggcggctctctcaggcgaaacagtttacacctggggcaataatgaaagcggacagttgggcagcggaaccaacgacagcacttcaacacccaccgcagttttaggcagctataaggacattgctgccggcaacagccacatgctcgcaatatccacatcagacgagctgtttacatggggatacaactcagtaggacagctggggctgggcgataaggtaagcagaaacgttccgacgtcaaccggaaaaaccgccgcagtcataggtgccggctataaccacagcttctataccgacggtgaaagcacctacggtttcggaagcaacagcaaaggtcagcttggtataggaacacaaaataccgctcttactcccactcttattgccggtttgagaaatattgtcaagatagacggcggattcgattttactatcgctaaagataaggacaacaacatatgggtattcggtaataataacgttggacagctgggtatatactaatcgttaataatttataaacatagtgtgatgtacaaacattatgtaataaaacaatatagtaaccggatcttaacaaatcatcaaaacagaacagaaaaagacaggcgcgtactcgtaaaagagcaccgcgcctgtctttttatttagccgattcgatatagaagctatattcggatgtgtgcacccgcctaaagggtggggcacacctatcgatgttcaccataaacaccgtattagataataaattatataaaaatgtagtttcgcaagcttcggtagggcagatgaaatctgccacgaaaggcgcgcagtcataggaaaatttgtaataaaaaaattatgataatctgccataagtaattcacgcttcgcgtgagatgacagctcacctaacgcggcagacaaagtctgccctgccgatgttcaccataaacacctccttatcagataaacattatatagtagattataaaaaatgtggttttgcaagcttcggcagggctgtgactacacttttttaaagtgtatgtgatacaaatccctttgtattgataaaccttcaatgtcaattgtggctacacttttgtttaaaagtgtatattataaaaactatattgtgttatacaaactataaacgccaataattaacttagttgttatataataaatcacttagttgtgatgtgcaaacgtagtttgcctcgtaaggcgcgcagttgcggaaatgttttttataaaaatgattataacaaactgttctaaacatattcacgcttcgcgtgagatgatagctcacctaacgcggcagactttgtctgccataccgatgtttattcaaaaatatccttgacttttctgtccggttttctgttaggtttccattatttttgataacatcggcctcataaacaaacttttaattttactattcgtttaaaatatattttaaactattaaaacaacaaactataaacagacaaaaaataatttatagcatatttttataacgtccgcagcattacgctcgaatgcaaacaatatgagatacatttcatattaaatattataaaataaaatatatatttttattttattaatgtttaataaaaatttaaatgtatttttatgtataattctgtattgtaattattttatttatatgataccatgtatataataatttaatattataaatttatttttttaatatttgattataaacaataattaaaaggagaaagtacaaatgaaaaaaacaaagaagcatctaagcttattgcttgcagccatgctgttaatcagtactgcggttttgccggtcaatatctttgctgaggaaatatcctcagatgaaatcaatattgaagaaccggccgagacagcagtcaacaccgaagacagtgataatactcagtcttcatccgacgttatgcatgaaacaattgaaagcgattttttaccgggacggattatagtcacaatgaaacaaaaccctgcttccgcttacggaatcgctccattctcaaataacgaaaattcaattttaagcagtccggtttttgacggaattgatattgcaaacgctgaagttatttctccagcaaacaacagcgctttatcagcggaaaacaatataatgacgctcggggaaacatctgaggatgaagccggcgacattcttctgcttgaattatcagaccaatccaaacaggcggttttggacgctgttaatcaacttcaaacaaatgaagccgttttatatgccgagcctgattatttatatgaatattgcgagacagttccaaacgatgagtattattatgaccaatggggtctgcaccgaataaacgcttccaaggcctgggatacgtttaccggaaaccctgacatcgttgtgggcgttatagacagcggtactgattacacacatcctgacctggctgataatatctgggtaaacacaggggagattcctgacaatggaattgatgacgaccaggacgggtacatagatgatgttattggctggaactttttcaaaaacactaacgacccaatggataatgaataccacggcacgcatgtttcaggaatcattgcagccaggggaaacaatgaaataggaataagcggtatagcctggaacaccaaaatagcaccgttaaacgcaggcgccggaaataatgaaataagcagcgcttcggttataaaagcccttgcatatgcaacattccatggatttgatattattaacgcaagctttggcggctccgtttatgccggcggaacgaaaactgcaatagacagatatcctggattatttgttgccggagccggaaaccaaggcactgacaatgatatccatcctttctatccggcctcttatgactgcagcaacataatctccgtagcaaatatgaacgtacacagcacgctcaattatgacgcaagctacggcgctgtatcagtggatattgccgctcccggcaccgatatagtaagcacattcccaggaaatgattactcacccctgagcggagcatctatggccacaccttttgtttcaggagccgcggctctgctgaaaggatataatacaagcttaagtaccgccgaattaaaagaaaaaattttatccagcgtacaatcttttgatgacgccgacaaagtgtccagcggcggatgtcttgatttggctaacctgttaactccctcaaacggaacggcaaacgatggtatccttgacgcaggcaaggatgaatggtggacaacttctatagaatggaatcaatattcaggtattgatgaaaacgagccatatatgcagcagtgcagatttaacatagacagtattgatgttatatgtaaaaataaaacctacacagttccgtccaagacatttaaatatgatgtaattgaagcgaattatgattatgagccaaaccgcgagtatgaactctgtgtaaaggtaacctatgacggcacggctgaatattttatcgacccgggaaacagacagctggaaatgggtcaggataacaaaaaaacagcatattttgatgactatgctcttttctgggttgctgatgtttattccgacagcaacggtcagttattctcacacagcgctaaactaattgtgccaaactacacctggtggaaccacagcctgacttatgacccggagaataagccgaattcaactttgaatatagacggtatgcaggtttatgctgacggaaattattacactgtaccggctaaaacaataaatatgagaccggctgctaaaacacctactattgcacaggaacgctacaacgcacttgcagttagaatcagcaaggacggcactgctgaatacggaacataccttccatggtatgaccgtgataatccaaaacctatttttgaccaatacggaatcacaattcctatttttgattttatgtatggtcctaactatgagcttttggtaacaaaactttggtttaataataatatatattatcaaaatgacggagtcgtatatccaggaaaagatatatggtggaatacaggtataaactgggaacagtatgctccggacgaaggtccttatttccaaaaatgtttatttaaagcggactctataaacgttgtctgcaaaaatcaaacctataccgtaccaagcagaaacttccgttatgatgttattgaagccttatacgactacgaacccgagcgcgaatactatttaaccgttaaggttaactataacggcgcagcacagtatcagctggaaaataatgttaacgagtataacagcaacagcgcagctgtcgtttattatgacaattatgccgtaatgccaatcggacgcgtatattcagataaaaacggacaattattctttaagtctatacttaatttttctgtctataccaacggacagtgtataacacagatgtctgccccggtattaaatacaaatttaaaatttaaagatattgccgcggagcgtgaaacagctgttggtttaacagctgacggcgagatttatgtatggggagacggcgcatattatgacctgggtcagggacaggtaaaactgaaccaatatacgccgctgaaagttgaaggtcttcctgaaatcgttaaaattgccaaaggcaaacaccacgtactggctcttgatgtaaacggagaagtatggggctggggcaacaattccagcggtgaagttcatggtgcatataaaggcaaagtgtatgtgccttcaaaaatttcagggcttagcaatataacggatataacggcaggcatcggattcagcgccgctataaagagcgacggaactctctggacatggggtaacaacacagacggcaagttaggtgaccgcggaacaagcgcagcaaacgttcctgcgccggtaacaggtctcagcaacgtatcaaaagttacatgcggagagaagtttatggcggctctctcagacgaaacagtttacacctggggcaataatgaaagcggacagttaggcagcggaaccaacgacagcacttcaacacccaccgcagttttaggcagctataaggacattgctgccggcaacagtcatatgctcgcagtatccacatcagacgagctgtttacatggggatacaactctgtaggacagctgggactgggtgataagataagcagaaacgttccgacgtcaaccggaaaaaccgccgcagtcataggtgccggctataaccacagcttctataccgatggtgaaagcacttacggtttcggaagcaacagcaaaggtcagcttggaataggaacacaaaataccgctcttactcccactcttattgccggtttgagaaatattgtcaagatagacggcggattcgattttactatcgctaaagataaggacaataacatatgggtattcggtaataataacgttggacagctgggaatatattaatattttaaatcaattaaaaataaataagacgcctaaattggcgtcttattttatttaattcttataaataaagtattttacaataataaggatttatagtcagattaggcggtctgaattataatataaactttaaacatcctttctctctattcagaattatactattatccgcacatcttaataatcccatataaaccggcggttaaaaatataatgcttgtcagtcttttttatcccttttaagcaaccaaactcctaatttacatctataaatacccatttatccgaacagtctaagtttctatgagttttaacattcagcctaattataataaaaatattctccggtatgcgctaatcagttttacaaatttgcaaaaaacgtttaaacattatctttcaattcaaaatacttcaattgtatcatttaaggtgttatacaacttatttaccgaaattccaaattctattccataaaaaacaaaaatatcttttttaacggataataaataaaaattcttaataataaaaaagtttcttctattcaagtttttgccaaaaatggcaggaataaacatataagcaacagagccacacttccggcacaggtacttttcaccacttttcaaatgtgtgaatttaaaggatttaaaaaatgtgtggaattataccacaaatattgacttttaccattttcaattcacgcacccttgtggggtgcgacaaactaactatgatggtcgttgtgtagtatgcggaatttcaatccacgcacccttgtggggtgcgactgcaaaaatatataataaataataattatagtgctctatattaagctgttttactttaaaatataattatttcttataaaacgctatattttagcttatttttactacatatatttgcttaaaagcgatgcgaatcccccggttattttatgtgagcttaatgttcgcacctgtataatatttattctatactataaaaaacctcaatatgttttttatagtatatcattaataatgttattttaaaatatttaataataattaaaaaaagttatagttttataaaaacataaaacaaaaattgctctgattatttgttttatattatttttataatagatatggagaaacaaaaatattcctgttgaactgttatattgtaattgagatattaaattaaataatataatttaatataaaatgctaaaaaagtaactcacagagaatagacagaattaagttaatttcgttccattaacattaagttcaaatttagctcccaaacgttctgccgcgcggcggcacattatcatacgcgccaaaaatatttcaaaataatcagttaccgagcaaatatcagtgtcaatggttaaatccatttttataaccttggtttcaactgaatttttacttctgctctcaactgaaacttctgaaacgaccgccgcatagttaactctgtcgtgaatatcaaaatctttattatctcttgtttttacacggctgcgtctaacatcggttttatcagctattattaatgcggaagccaatgagttaacaggtatccctgttccctcgtcatgatttcctatggctcctataacttttgctatctcaagcggcgccattcccattctggtgagaatattaaacgccatcatagcgcttgactgagcatggtcagcacggtttattacatttcctatatcgtgtatatatcctgctatacgcgcaagttcagctgtgcgcctgtcatagttcaacgatataagtatcatatgcgcaatcttcgctactctttgagcgtgaagcagtgaatggtttgtgtatcctaaagttcccagatatttatctcccatttcaagatatgtctttatttctttatccttaacaatatcctgaaacgttatcaaatgttcttcttcctgtatattctttagattattgtttatattttcattttgacctgacacaaccattcacctcattctcaaatttattttaatatcaatccgccagtgccgccttagcatataaactgcattcaactctctttttcatcatttgacagcttaatttatgaggcttattcatatcaccgttaatcaaacaagcgttagcaatacatcctccgctgcagaaaaatttagcaaaacaactgtcacagtcaggttttgtataaacattgcatttttcaaaagtcgaacgcagttctttatttagcccgttggaatcgtagagacttcccatcttatattcctcgctgccaacaaactgatgacagggataaacatctccgttcggcgccacagctaggtattcacagccgcagccacagcctgacagcctctttataatacaagggccttcttcaaggtcaatcataaagtggaaaaagttaaatccatttccttcctttattctctttacatattcttttactaaactttcatactcattaaagattttcggcaaatcttcttctcttaaagaataatcagtctcttcgccgcaaacaacaggttctatagaaatctgcttaaagcctaagtcagctaaatgaattacgtcttttgaaaaatccaggttttctctggtaaaagttcctctgacataataattatcctggtttctgctttcagcaactttctgaaaaataggaactattttatcatatgaaccgcttccgtcagcccggtatctcattcggtcatttacttcttttcttccgtcaatactgagtactatgtttgacatattttcattaatatattcaagttttttctcatcaagaagtattccgttagttgttactgtaaaacgaaaaaccttgttatgctttttctccaattccctggcatattccacaacctcttttacaacctcaaagttcattagaggttcaccgccaaaaaaatcaacttccagattccgcctgtgcccggaatgctcaaccaaataatccatagcgcgttttccggtctccgcagtcataagttcacgtttttcagtgtgatatttaccctcgtcggcaaaacaatatttgcatcttaaattacagtcatggctgacatgaagacacatcgcttttaccggcgcgttttcttttagatttgaagcgatttcaaaatcgtcctttgcccacagcataccgttttcatataattcagcaatatctgcaagtgcgtcactgatttcaccgcggtcataatcatatttcaagtcgtcaattagcttaaactttgcttctgaagaagttggagcaaaattcttcacattcaaaaaattaattatatcataagaaagtttgtccatatcgtgaacacaaccgctgttaacatcaagagctatatatttgtcaaacattttaaaagtatgtaccataataatctccttgtaaataaacgtaaatcggacgtcctatgttaaacaaggacgcccgcaatgctatctttatttgataattcagaatatcggcaaatactagacttgcctatttatatcctatttattatcgttctcgcatttttggttggcaaccgtacaagatgtcttgcaagctgattggcaagatgtctggcattcgccgcagccgcccttgcatgcgctgtttttcagtgaagcactgtttaatgtctttattctcttcattagtaacctctcctttatataaactaaaattattaatttactattataacttgtatgtatcagcgtttgcgttttttcttggtatatctgtttataccaacaactccgcctaaaccgctgacagctccccctaccgcaaaattagcgatagcctcgggggaaaacgaaatacttttaaatcccagccagccaatcaaatatacgattaccgcatagactacaccggctatcacacctattaaaagaccgtttttaccattatacccggcggctttaaagccaaccataaataggcagataagagatacagcaataacaatatagtttaaaacaaattccggaatatcataaaatgaagccgcaaccgaagtcagaaacagcaaaattaaagccgctccaaaacctatgcagatactttttatgagagaagaaattgttttatctcctcctgacgtttcaccgccggattgctcacgcttaaatcccccgggagaaaatcctccctgcctctcgcttttttgaaaagcaccgcttgtcatacagcacacaccctttgcaataatttaaagttattaaactatatgcaaagagtgaatactaaatgtcaaattttaaaaactactcggcatcagcagcttcttccaaaggagcgacatcgctttccttggatgttccttcgctgataagacgcgctatagcgcttttctcaatagtaacataagactttgttgttccaacgcctgtctccaaaatgaaaagattgtctttaactctgttaatctttccatggataccgccgattgatgcaacttcatctccaacttttaatgaagaaatcatgtccttcaatgccttttccttcttcttctgcggtctaatcaaaatgaaatagaacacaacaagaatcaaggccatcataagaaacggataaaagttctgtaattgacttgcgtccattgcttaacctcctattaaagtataatgacgttattataaccttatcaaaatcaatttgcaatagttttttaaaaatttatcaaaaatgtaacaaactggattaaaatatatgtctaaaaccttacaactttgtctttatttcgccattcttaatatttcaagtatatcgttctcttttaattcaacaaaatttccctgtttgcctccgcctatttcaacagcttgttttgccataagctcaaacttttcatctccaatattcacttccgataaagttttcggcagacctaaagactgcaaaaatctctcataagcttctattccgttcatagcagttttggtcggattaaaaacatcgttttcaacattaaatactcttgtcgcaaactgaacaaatctgcttacatcatgtttaagcacatatttcatccatgccggaaatacaatcgcaagccctgcaccgtgagcaatatcatagtgagcgctcagctcatgttcaatgttgtgtgaaccccagtctcccactctgccggtgtttaatagattattgtgtgcaatagttccggcccaaacgacctgtgcccatgtgtcataatctttgcttccgtcaaccattgctttcgcattatttatcactgtcttcattgcagcttcaatcattctgtccgtaaactcaacgccttttgtattagtaaaatacctctcagccaagtgtgcgaatatatctgaacagccgtttgctatctgcgtcttcggcaatgtatacataagttcaggattgataattgaaaatgtcggatacatacagccgctgtgaagccctctctttatccacccatcctcattggttataacgcttccgtcgctggactcgctgcctgccgccggaatagtcagaactgtacctaccggaagcattctttcaggaatagccttacgcgcatgaaagtcccaagggtcaccgtcatacaacgcacctaatccgatagcttttgcagagtcaattacgctgccgccaccaacagctaaaattgattcaacattttcacgcttacaaatatcgactcctttttttacaagacttaatctggggttcggctgaactccgcccagttcaatatactctacgccggcagaattaagagaggaaattattttatcatacaaaccgcttctctttatacttccgcccccatagtggagtaaaactttactgccgtatttcttgatttcttcgccgacggtttcttccgtctttttaccaaatattattttagtataattatcaaatacaaaattatccatatactttagtctccttacaaattatttctatgtaacagtcattatatcataatgttaataaatatcaagtatatatttatatttaaggcttatcaatatagatttgagtttatttatcaataaaattattaaagtcagttatgcgagtgaaaatataaaattaacgctttataacttgtaaaaacttttaacaatagttttattcatgcctttaacccacgctgttgcagcatcttctgctattatttattacggttattcaaaatgtcaataaatatctagtatattttggggcttttatatataaattacattgacacccttttttagctctgctataatgtttgttaagttgcttaaccattaagccgctgttaaattttaaggagataggagtatatgtctaaaattggctcaaacccaaaaataagccaggatacatatgtaaaaaagacacagatattaatcttaaagataaaagaagcgcttaattgtcttttatctgtattgccgatatccaacagagaatattttatcttaaaaacaatagacgaaagtatgtctgaaggaaataaaataacttccagtgatatcagcagacaattcggcgtctcacgcgcggcggtctcacaatatatctcttctttagaatctgaagggtatattctcaggtataacagtgaaaacgatagacgcagaacttatcttatcaccaccgaaaaagctaaagacataactagaaaaatagattcttatcttaataaaaattgcatcacagttaaagacaccatgggtgaagaaaaattccgaacaatgcttgaattaattgaagaatccatagttattataaaaaatatttcagaaaaagacaaagacattttcagttaagaggctcagaacatgaacaaatttattttagtacgtaataaaatcaaagatttcacttttttcatcggaggcaaacttaaaatattttttgccgccttatggaaactgatgaaaaaccataaaatttggagcgctgtcatctgtattgtattagcgcttgtattatttattgggataagtacagtcaggctagggaaaaaattagaagacagcaatcttttaattaaagttgaaaagcgagatattgaagaaaaaataaatgacagtactgttgttgaaccgaataacgagtattcaatcacagcaaatgtaacaggtgaaattttggatgacccttttgaagaaggcgacactgttcaaaaaggcgatttaatgtacacaattgacgccagtactatcgaaaacagtattcaaagcgccgatatagctatagctaaagccaaaaagaactatgacgacgcaataaatgaaaattctaaaactgtacgcgatacagctaccagcgccagttccgttgaaagcgccagaattgccgttgataaagcacagcaagcgtataatgacgcactgaaagcaagagatgatttgtctctcaaatcaaaccacacaggcatagttacagagattcacatctctgagggggacaccattgctgccggtacaaaaattgctgatataattgataattcaaaactaaagataaaagttccgtttaatacagctgatgcggataatgtgcatgttggcgaagcggcagatcttactttaactaaaaacggctcgtctgtacgcggagttgtcaccgaaatcggcgctttagttgaaagcggaagcggttttacttcatataaaaaggtcactattgaagtagataatccgggagctatatcatcgggagatactgctacggctatggttggagatatagcttgtaacgatgccggaacttttgaaaaccttaccgaagatagcattacagcttcgtcaggcggcaaaataagctctctgtacatatcggaaaacagtcatgtttataatggtgaaaaaattgctatgctggattctgactctgttgaatcacaaatctcatccgcactgttgtctttaaatgacgcaaaccaggctcttgaacgcgctaagattcagcagaatacttcaaacgcaactacaagtctcggcgatgacaaactgaattccgctgttaaaactgcgaaaatgacgtacgatgatgctgttctgtcaaaagaaaagcttctgaaacagcttgaagactacaccattaaagcgccgatatcaggaacagttgttaccaaaaacaaaaagaaaggcgacaatctcggaagcggttcatcttctacttcttcttacagctcatcgggaagcagttcatcgtcctctcagttgacttctgccagcgcttccagttcagctatggcggtaatctatgatatgagtgaacttaaatgcactttaaacgttgatgaacttgatgttaaaaatgttaaaaccggtcagaaagttacaatcactaccgacgttacagataaagaatataccggcgttgtagaaaacataagcgttaacggaactgcaggttcaaatggagtaaccacataccctgtcaaagtaaatattatcgactttgatgacgcgcttctccccggaatgaacgttgaagccaacattattatatccagtgttcacaatgttttggctatacctgtcagcaatcttaaccgtggaaacactgtatatgttaagggtgataaaaccgaagaaaacgataaagctcctgaaggttataagactgtttcagtaaccacaggttccagcgacggcgaatatatacaagtgttcagcggggttgaagagggtgaaattctatactccacggcaggaaccggaaattctatggaagaaatgatgcagcagagccacgaaagaatgaaagacagcgccggcggcggttcaggcggcggccccggcggaggtggaatgtaatggaaacgcctcttatagaatttcaaaatatttataaaatctatataatgggagattctgaagtccatgctcttgacggagtttcgatgaaaatatataaaggtgaatttgtcgctatcgtaggtcagtcaggaagcggaaaatctacatgtatgaatattataggatgtcttgacgttccaagcagaggaaaatattttctccgtggaactgacgtcagcaccatgaaagatgatgaacaggctgaaataagaaataaagaacttggatttatattccagcagtataatcttatccccaaaatcaatgttcagcaaaacgttgaactacctctgatgtatgccggactttctgaaaaagagcaggaacgccgcgctctcatttcacttgacagggttgggctgaaagcaaaagccaaaaatatgcctcagcagctgtcaggaggacagcagcagcgtgtgtcaattgcaagagccctggccggcgacccgtccataatactggccgacgagccgaccggcgctcttgactccaaaaccggtaaagaggtattgaagtttctgaaaaagattcacagcgaaggcaatacaatcgtgcttatcactcatgataatacaattgccgcccaagccgagcgagttatccggatacaggacgggcgcataacatacgacggcgcgcctgaaatagaaaaatttgcaacagtagcccatgccggagatgacgaggaggacgacaacaatgacgcttaaaaaatctttcgggcttgccttctctaatcttatgtttgataaaatgcgttcactccttacaatgctcggtataataataggagttggagcagttattatacttatcagcctcatggacggaatgatgggaatgatgacagatcaattttcaaagctgggaacagacacaataactgtcagcgttcaggacaggggcggaagccgaacaattgacgaaaatgacatgtatacttttgttgaccaaaaccccgagttttttaaggctgtcagcccgagcgttatggttgcttctgctaaagttaaagttggacgtgatgatttatccacctctgcaacaggagttgacgagagctactgcagtataaaacagctggagcttgaacaaggcaggttcttacaatttgtagatgtagagaaaaaacaaaaagtttgcgttatcggtacatatattgaaaaagaaatgttcggacgcggaaacggactgggacaaaagcttaaaataaacggagatactttttccgttataggagtgctgacagaagaaggcgattcaaccagcggaggacaggatgaggtaatctatataccttataccaccgctgtatcaatgtccaacagttcatttatcagttcctacactgttcagacaaacagcgttgatatagtagatgatgcaatgacaaaagtaaagcagtttttggctaacaaaattggcgacagcgattactataatgttacaagcataaagcagataatggatatggcaagcaccatgacaagcactatgagtactcttttggtttgtattgccggtatttctcttttagtcggtggtattggaataatgaatataatgcttgtgtccgtaactgaaagaactcgagaaattggtatacgtaagtctttgggcgccaaatcgagggatataaaatctcagtttgttattgaagctgcaaccgtaagcggtgttggaggtcttattggaattgtggtcgggtcaatcctcgccgttttatttggacggctcttaggtttgaccgcgctaccatcactgacagcaataggagtttcattcggcgtttctgtaggtatcggaatcatgttcggttatctgcctgctaaaaatgccgctaaccttaatcctattgacgctcttagacatgaataagataaaaccacagagattggaggaaattatgaactatatatccgcaaaaatttttaggcctatactttcatttattttagccatatgccttgctgcttctgctttttcagtaacggtcttcggcagtgataattctcagcaggatgttttgggattattatctgaacttaaaattatgaacggcgaccctgacgggaactttagactggatgactttgtaacaagagcggaattcacaaaaatagctgtagcgtcttctgattaccgcaacagcgtagcatcaaaccttgcaatttctccgttttatgatgttccatattcaaactggtctgctccatacgttcgtgttggagttacaaacaatcttgtatcaggataccctgacgcttcttttaagcctgatgatatagttacttttgaagaggctgtaacaattatgctcagggttttaggatattcggacagcgattttggcgtagcctggccaagcggtcaaataggaatggctgacagtcttgatatgacagataacctaacagatatcagtatcggtactagcatgacaagaaaagacgtttctacattagtatataatacattaagaaccaaaaagaaagattcatcctcaaaacttatatctattttcgatgtcgcttttgttgaagatgtgacgctgatttccacttcaaaagaggacagttctatccccggcgatgaggtcttcaccgacaacggcacatataaaataaggtctgattttaattattcatatgttggaatgaaaggagatatagctttaaaggacaacaaaactgttataggcttctttccaaaggcggacagttctcctaatgaaaaatatgtggtatactccgtactaagtgacaacatagtggtatacaaaggcggcaatatgacaactttggatattcctgccggcaccgtcgcttatgacggaacaaccagaaccacctacggagctataaaaacatcttttgaaatgggagacgttcttaatattaaaaagactaatggaaatatagattacgtagtatacgaaaaaggtaatatgcaaggtccttacacaataaactcagagaataactgggctgaaactctcggaattaattcatctactactatcatgagaggcggagttgcctgcacaatttcagatataaaaacctacgacatactctactatatacctgaacttaatatggcctttgcgtatactaccaaagtcacaggtgtgtatgacaaagcaaacccaaataaagataaccctaccgaaattgttgtctcaggtgtaacatataaagttgagggttcaaatgcttttaataagctgtcttcaagcggaaacctcgcactgggagaaacgataactttgcttttgggaaaaacaaatgaagttgcagacgttgttacctcaacagtaactgattcggaaatagtcggatatgtctttgaaacgggaaccaagacttatacatcagaggacctaaaggattattcaaattattatatcaaagtagctgcggcaaacggtgaaacttacgattatacgtgcagccaaaattatgaggattataaaaattctgtagtcacggttagtataaatgagggaatagctaaaatttccagaacggacagcgcaaaggtcagcggttatttccgttgggacacaaaacgtttcggcgacgattatttggcaagcgatgtagaaattttggacgtgggaacaacaaataaaaatgacccgtcattatataaaaagatttatcctacccgtcttaataatgtgaatattaattcaaacaaaattctatattgccacaaaaattcaagcggagaaatagataagcttattttaaatgatgtaaccggagattcttatacgtttggagtaatgacctcagcacagaatatgagctttggaacatctgtcagcggctcatattcatatatagtaaacggcaacagttattcatttacaagtccgtcaacaatatattcagtgaacagcggtcagggagtaaggctttcatccgcaagcaatccgtcaataatgtcaccgctaagcgaagtaaagggcacagtaacagttacaagtgccggaaaccttacagccgacggaaagagctatgatatatctgctgacgttcaagtatatgaaaaggaatactcctcttctactttatataggctgaagccaatcagcgacattataggcagtgacaattatacactgtatgcgtactacgataaactgccctcaagcggcggacggatacgtataatagtagcagtaatgaagactgtataaacaaaaaaactgaagggttttgcccttcagtttttttatgtcacattttattgtataagacgttttatatcacatgtccgtcaaccgaaattgtaataacttttaaagatatatctttatcggagtttgacagagctaccttaacagcattctccaatcctccgcagcatggtacctccattcttaccacagttacactctttatttgattcgctttaaaaatctcgccaagcttttcggagtattcagtcatatcaagcttaggacagcctattaatatcaccttatctcccataaattcctgattaaaatttgcatgtgcatatgcggcgcagtctgcggcaactaaaatttcagcattatcaaaatatggtgcgttgaccggaactagtttaatttgtacaggccactgctttaatttggactcataatcagattcggaataattactctcactgcgcgcaaattcttttaatgcgctgcccggacatccgcctgtatgtaccggcttttccatgttctttttaaccaattcttcattatattctgccgcttctctcttctcaattgttatcgcgtcaaccggacatgaaggcagacaatcacctaaaccatcgcaatagtcatcacgtattaatctagctttaccattaatcagttctatagctccctcatgacatgctgaaacacaaagtccgcagccattacatttatcttcatcaatttttacaatattccttaacattatatcttcctcctatattttttgaataattctacatataaaaagattatcattgaatttcaaacatattttaatttatttcgtattcaaactatatcatttttttaaatgtatgtatgttgcgattgcaacaaataataaactgtgttaaaatatttatagtttaattaacggaggacgattttatggaaatcactcaatacacaactgagcttccactgtttgaaggaataaaaaaagatgaaataagttcggttttaggctgtgtaggagcatataaaaagacttttaagaaggacaatattataatggctcaggatgataacgcttgtcttgtaacagttttaagcggcacaatacatatgacaatgtgtgatattaatggcaatcacactctaataagcgtactttataaaggcgacttttttggtgaaaacagtctttgctcaaacagtttttctgattctatctcattctacagtgaaactgactgcgaagtcttgtttctcccatttgcaaaagtattaaattcctgctcagctgcgtgcgaatttcaccaccgattaatagaaaacgctgtaaaacttatggcgtctaaaaatattgagcttgttcaaaaacttgagataatatctaaaaaaactttgcgtgaaaagattctaacctatctatcaattattgcaaataactccggaagctattttaaaactgatatgaaccgttctgatctcgctgattatctctgtgctgacagaagcgctctttcaagagaactttcaaagatgaaacaagacgggttaatagattttgataaaaatacctttcggctgcttaaaaagaatataaattaaatttacttaattacatttttaagacaaaacacactaaaaccaaaattcggcatatcctgatactaacagcagaactttttgttgggaggtatcatgatatgctgttttgttttttgcttgcgtttatacttagtttcgattccctgggcattggagttgcctatggtgtaaaaaatatatatgtacctaagacaatccgtctgataataagtttagcgtctttcacattatccttcatatccacagcggtgtcccgtttggctatttcagtaatattttcgccatttgtctccgacttaattggagccataatattttttgttattggaatttatatgcttttgtcgctgaacaaatctgatcttagcttcggcgacacggataattcacttgatattgacagaaaagaagctctgtgcataggaatcgcggtttctatggattcatcggcaactgggcttggacttggcacaaacgcttcgttctggtttcctgtagcaatattttgtatgcagtatcttatgcttagcctcggaatctttttaggcggaacagtcaaaaaatttccaaagataaatgataagtttctcactgcaatacccggaataatacttataactttaggacttttgagactgtttaatataatattttaaatacctaaaattctttcagtgtttttatgaagtataagttctctttcttcatttgttaaatcaagtttctctatgtattcaagttcggttccagcatcccacatcggataatcggaaccgaagagtacatgctccgttccatactgtcttatcagctcattaatatgttcaggaggcacactatacatagtgctggacgtatcaacataaatattttttcctttaaaaactcttgccgcgtcgtcccattcagaccagccgccaaaatgtgctcctatcactgtcattgccggaaattcatccatcacttttgccattctttcaggtttgctccattggtatctaaaatcacccgtatgcactaaaagaggcaatcgtcctgaaattgcttcgtatatacaaaatgctttatggtcgtcgatatgaaacctttgaaaatctggatgcagcttaacgccttttaatcccatagagatacatcgctcaacttcatcatttatattctcaaagtctggatgcaaagtcataaatcctataaccctgtcgggatatttttgggtacagtcatatataaaattattcactgattgaacctgatgaggagttgttgcaggagaatgaataacaactttattcactccagctttgtctgacagttccagcagtctttctattgtcccgttattaggcacgtctatattataaaaatcttctattccctgtgacgctttttctgcaattttattcggaaatacatgcgcgtgtatatctattatcattttttatcccctatctgttattgttaatgtttcatataaaattatagcattatctattttaaatgtccagtcacttatttgttatcaataaaataattttacagttttaaatagagtattataattatattattttatttatgaaaactctgtcgtgagcaaaataaaattatattataaaaaaacaaaataatatgcaaaatttatataaatttcaaataaaatcacccgttaatcaggtgttctataactatctcataattcatattactgtacaataagaacatctgtaataaaaaaacattatcagccgagtttttattttgctgatttagtcaatattaaacttattaaagatttattccccattttgctattgctttttattgccaattatgatatactatttaggattattcttatgtaacaattattatattttttatcaaggaaaggagttgtgccgaaggcaaaagcctccgcgcacaaaaaaattatggacagttcttttggacttgttattattcttgcactacttattggctgctcggcttttttctctgccactgaaacagcctattcttctctgaaccgtatccgaatcaaaaatcttgcaaaagagggcaataaaaaagctcttttagtcgaacgtttatccctggattatgacaaacttttatctacaattctaataggaaataatattgttaatatactcgcgtcttctttagcaacagttcttttcgtccaatatttcggaaacgccggagttactatatccactattgttatgacaatattagtccttatatttggcgaaatatcaccaaaaagccttgcaaaagaacagcctgaaggctacgcaattgctgtttccaaaatagttgtgattctgcagtttattctaactccaataaattatttgtttggattgtggaaaaaacttcttggcaagctttttaaatcaaaaaatgacagcggtattaccgaggaagaacttttgactatagttgacgaagcccaaagcggcggtgaaattgacgctgatgaaagcgaccttataaaaagtgctattgaatttaacgatttggaagccggggatattttaaccccgcgtattgatgtgtgcgcgcttgaactaaatacgtcaaccgaagagattattgaaatgtttttagaatccggattttcaagacttcctgtttatcgggatacaatagataatattataggtgttgttcatcaaaaagacctgtttcatctaatacaaaaaaacagcggcggaaatattgaagaaataatttcaccggttatatatgtttccccttctataagcatttccgaattaatcagggttctgcagaattcaaaaagtcattttgctgtagtaattgacgagtatggcggaacagacggaattcttaccttggaagatatacttgaagagcttgtaggagaaatatgggatgaacatgacaaggttgtagaaaacatttctgaactgtctgacgggatttatgaaatactcggaggtactgatttggatgacttccttaaactgatggacgaaaaacctggtgatgacgacccaaatactgtttcgggctgggttatggagaaactcgggaaaatgccggaactcggagacacttttgaatataacggacatcatatctatgtcatagaaatggaaaaccggcgtgtagctaagataaaagtgaaaatattgcaaaataaataatttttatgttgacggcgccgtgtttttatattaaaatagtctatggaaattgaattttatattataaatgtggaggtattataaatgtttaacaacatcccggaagttaagctgggtatcgttgcggtgagccgtgactgtttccctattgagcttagcaagaaaagacgtataaatgtggtaaaagcttgtgcggacaagaatattgacatatatgaagcacagactattgttgaaaatgaaacagacatgcttgaagctattgacgaagtaaataaggcaggagttaacgctcttgttgtatatctcggtaactttggtcctgagggtcctgaaacttatctttgcaagaattttgacggtccctgcatgtatgttgcagccgctgaagaaacacaagaagatttgatagacggcagaggcgacgcatactgcggagttcttaacgcttcctacaacttaggcctaaagaacttaaaagcatacataccggaatatcctgttggtctgcctgatgaagttgcagatatgattgcggagtttgaaaatattgctcgtgccattattggtgtaaagagtttaaaaataattggatttggtccgcgcccttatgacttccttgcatgtaacgctccaattaaaccattgtttgaccttggtgttaatgttcaggaaaattctgaacttgatttgctggcttcatttaatgaacatgaaggcgatcctaggatagaagctgttgctaaagaaatggcagacgaacttgggtcaggaaacaactatccttcactgcttactagacttgctcaatatgaaattactttgctcgattgggctgaagctaacaaaggagcttctaaatatgttgcgtttgctaacaagtgctggcctgcattccaaactcagtttggattctgtccttgttacgttaattcccgtcttacatcaaaaggtattcctgttgcttgtgaaacagatatatatggagcattaactgaatttattattgcctgcacaaccggcatagctcctactttgcttgatattaacaactctgttccaaaagatatgtttgaagctaattcagataaattcagcggttatacattaaaggacacattcatgggcttccactgcggaaatactgcttgtgatttattgaccgattatgctttaaaatatcagttgatacaaaagagaaatctagagcctgaacttcctgagcctaatgtatcaagaggaacattagagggtaatattcgtcccggagacgtaactttattcagacttcaaagcacagccggcggtcagctcagaagctacattgccaatgctgagataatagacgttgacccgaaatcattcggaagtattgcagtatttgctgtaaatgagatgggtagattctaccgcaacgttttaatcaataaacagtatcctcatcacgcaggtatagcattcaaacacgccgctaaagacttgtttgaagtagtaaaatatttgggcgttactgatatagaatggaaccgtcctgcaggatgttattacgagggcgaaaacccatttgcttaaattattactgctttgtaattaaaaattgctattgttatatatttaaagactggattcgtgatagtaacgagtccagtcttatttttatttagtcaagatagtatcttaatatacattatataaaaaagccaaaagtcaccaataggtgacttttgacttataaacaatttaaaatataactaaactcttattctgctgtaagattaaacacagaacaataaggatttaaattttcgtcccatacaaacacttttgctccatcctgtaataatccgtcaaaagtaattgtttgctctgctccgccatctaacactgcggttttcgtcttagcatttttaataattttaccattcggttcatactgagcgacaaacacctgaacagatttcggctcattagaattgttctttaagttaaccgaaccggttccatcaacaattttctggtacccatttacaattacgtctcctgccaattttgtctctactgccatatttgcaaaataaggctgagcacttctggcaatcagacgaatttgctttaatccggaatcaattccgtctatagcgggcattgaagtatttactacttcctctcccgccgcatttttaattataactgtaataaagttatcagatgtgctttctttagtataatccaaagtgatgtcaatattgaaccaccctgcctgttcatttgaaaagtcatagacagcatttgcggctcccatagcaggacctacgcacaaagaaccatttgaggaatttaaaacctctgcaaacactccgcctaaactatttgaactatcctgataattctttgctttatcattttcaagatatattctgaatccatttttatcagacggactgagatacatatcagtattaaaagttactatatcagaatttttcacttcgctgagagctgtataaatatttctgctgttaatttttacagccgttttaccttcatactcaatttgtacagcgtctccgtcagttcccgctgcactaacctgaccaacattccaatcaggataatcggtgagacctgcgtcaggagtcggaaccggctcatctgtagcgcccgggtcaaaattcgactggttttcaagctttaaattactgaatttcgccatcgagtaatatgcctgcggcgatgcgtcagactgtccctgctgtgaatcaatagcaaccccgacataaagtttatttgccaaaccgcttattttcattgtatacggctgtctagcattatctttccagtcagttccgctgtccgaaactgagaacaaaagattatctccgcttctttgtattctcagatagtttggcaaatgatattttccgttttcagctgtatcataagggtgttcacccaaaatgttaccggaaactatctcgccttccttgcctctcataaatattcccattttattatcagtagaatttgagttttcactatcggtggctatattggcgtttttagtagtgcgggcaacaatacggtcatttctgccatattttatccagccgtctaccaaagcagccattcttgaaccggcgtcaagagattcgcggagcatcagtcccaaaactgctccattctcatttgccattatatcttccatttttaaagatatgtcaaagtcgcctgtaacctctttatacataaaatcaagcttatcggactttccgcctatcttaccgctgccgcccatagtataaatatctgtatcagcatcatatgaaactattccttttcccgaatatgcaggcggcccgatttgtttctgagtccagccctcaggcttgtttgtgcctgttacataaacaattgaaatagtgcttctggtcttctcacctttatcattatgcgcaacgcatgacagataatgtgtgcctataccgagaggaagtgaatcatctattgaagaaactccgtcgtatgttttaatcaatgactcgtcatcgtaaagttccatttttgttatatttgttccgtcagcagcttttgcagacgctttataacttaatgtatccgtgtcttttataacagtccagtttcccttttgaacagtctgaccatcaacggtgctgtttatagaagcgataaccgggcttgtaacaactatttcaggatttgtcggagcctgaacgctttgctgctcagtccaatcatttacataagcttcaacccatgtatatcctgcccatacaccgcttgtcactatatcagcttcagcgacgccggctcccataccatttgcagctttccaatctgcagggatttcaaaggttctctgtgaactttcgatatcggagagtcctccgacctcctcttcattgttaataattcttccggtctgatttaaaacatcggcaataacacgagcgtcagttgcgtctctttttggaagagtagctccaacgtcaggcaaaagatttgacattacgtcttttccaggcaatatatttccttctgtaatattcaaatccggatacaaatcatcgcctaaagaaaatggcgtgtcaaccttttccacctggtcagccgcactgttggtgccgtcgttagaccagttattattagtaaccgttgagcttccaaccacatagttatcagtcatatagaatttgcttttataagtcactccgtcaataactttagccatctttgcaaaatcatatatacggtatctcttgcctgaaactgtactcggaccgtacttataataattatttgaataattaacctttgacggatttataaccttattatgcggtgaagtaggctcgccgccataggctgaattggttacgccccagttatagacaacgttatttctaaagtctgtattttgcagaactctgtcaagtctcggcgaacggctgtcgtgatgagcaaacaagttgcggtaatatgtggcgttggttcctccaataattgcgccataaccgtgtgcgcctttaaaatgccccgacattctcatactttcagatgtgatagtattttgaactgtcaaacgctttccctgctcatatgtatcagattcagccgaacctgcataaagggtcagcccctcgtcaacacaccagcttgttgagcaatggtcaataataatatccgagttccattgaccgcctaagccgtcaacttcctgaccatttttattcgtcggtctaacacgcatatatctaataataacatttttcacgccattgcctatacgcaaatcaccgcctgtaagtgtgattccatcaccaggggctgtctgacccaggatagttatgttatcgttattgatataaacggtactcggaacgtctataactccgcccacatcaaacacaacaattcttcctgactggcttattgcgtcagtaaacgaacctggaccctcactgtgtaaatttgtaacatgataaacctctaatttaccttcaccactatccaaaattccgcgtgcgccttttgtatacttaccgccgccctctgctccgggaaaggctggcaaagcgttaccctgcagttccgcattatccgcaaaaacggacacactgacgaaacaaacagacagaaccatacagattgctactgcaaatgataatatccttttcataaaaattctccttgctccaaaaatttaagaacttaatattataccgtcaactgttattcccctctataaaaacagcacctccaatataatttgtatgccggtacaattaaaatcatatagatatattaccataaacaaatgtttttttcaacaagaattattgctattttacatagataaatgactatttttaagctaaaaggttaattattggcaatataacagtatattgcgcaattaatctgtataatatttctgtatattaaaataaaataatgtcatccattgacataatattttgatatgaaaacataagggatttattattaataaaaatataaatttataattttcttattttgtttaattgcataatcaagtgtacgctttgcaccaccgtctttataaacataacacagacaaatatcacaattatttacaatccatttattcctatttggtatatcaaatttataataggctttcgctccaaaaggacatattatagcatcataccataatttatccttttttttaatctgttttatattatatggaacaaatattatttttccacctaaatctttaactgccacttcacacattttatcaaaatttcccattccgccactataaaagtctgtaatccccatttttattaatttttctatctctgtataaattttattttcaataccaaaaatatctctatgacctattattgcaacagtctgtcgtttatgcaaaacaaacatctcctaacataatttatgattcaattatactctatttatcgacaattgtcaacttagcgataacaaattagactatttatattaggaactacatgaaaggcagaaactattatgattaattataaaccattttataaaaccttgcagaaaaaagaaataactacatatagattaataaatacttacggtgtgagtagaagtctaattgataggcttaaacatgataaaccaattacaactgtcactataaatgatttgtgtacaatattaaattgtaaagttgaagacattctccagtatgtaccagatgaaaattaaagctattgtctactttaagagaatagatatatactaacattttgatatgaaaataaatcaataaaactaataacattcaagttagacaggaaataaaaattaatttataaattatatattgaacactacgtgttcagatgatagctcacctaacgcgcttgctatcgcaagcctaccgatgttcactgaaaaaccttcttttttagtgaattaaataaataggaactcgaaatatctttattcacggcagtacacaaagtcaacgggaaagttacaaggctttttcatcttgaaactgcgtttcaagatgaatttagcggggtgcgagcgccccttggagccgttaggcgacctaagcgagcaagcactttttctttggtgaagcgtttctttttcttgccagaaaaagaaatggttcaaacacctattaaaagtaaaataatatatattatatggggtcatatacaaagttgattttaatgaatattttctttatataatgaacactgcgtgttcagatgttagctcacctaatgtgcttgctatcgcaagcctaccgatgttcactgaaaatcccagttttttatgtaataatgaaatgattcaaacaccttattatgtaataataaattttttatatatggtcatatacatagtatatagatagttctttaataagtaaaataataaatattatatgtggttatatacaaagtaaatattagtaattaataacagtaattctatcaactatattgataaaaaccataatccaacaaaagtgcccttctgaattcagaagggcatttttataataattaaaatctcccgcgctctttgtacgtcgtgtgcagcagctcatgcgcaagatgtgaacccggtttttcaaaaaagtcctcatacagcaatgtcatatcaggattctcgtggctctttctaatcttgcttcctctgtcttccgaatataacgcttttgctcgctccgttctgacatcaatatccattttcagcctcgacggaactataggctgtcctccgccgtttacacagccgcccggacaggccattatctcaataaagtgataatccgccttgccttcacggatattgtttaaaagctttctagcgtttcctaagccatgagcaacagcaaccttaacatcaataccgcccatatttactgtggcctcttttattccttcaacgcctcttacgtcatcatattcaatctcttcaacagattttccgcctaacgtgtctgccgctgttctcagcgccgcttccattactccgccggttgcgccgaatataactccggctccgctggcacgttcaaacggaacatcaaattcctcatcaggcagtctgccaaacattataccagcctgctttatcattctcgcaagctctcgagttgaaataaccgcgtcgacatctctaagtccgtcagactccatctcaggacggcctgcttcaaactttttagccacgcaaggcatcactgaaacaacaaatatctttttagggtctatattgtttttctttgcgtaataagattttataactgctccgaacatctcatgcggtgatttgcatgatgataaattatccaaaaagtccgggaagttatgctcacaaaattttatccagcctggactgcacgacgttatcatcggcagctttcctccgttttgtatgcgctctaaaagctcgtttgcctcttccattattgtcaagtccgcacctgtatcagtatcaaacgtcttgtcaaatcccaaacgcctcagtgcggctgccatttttcctgtcaccggagttcctatcgggaatccgaactcttcgccgagaccggctctcacagccggagctgtctgaacaacaacatatttgtcatcgtccgcaattgcgtcccatatttcttgtgtattatctttctctctcaaagccccggttggacatgacactatacactggccgcagtttacacaggccgtatctgacagcgccttttcaaaagctgtgccaaccctggtattaaatccgcgctgcatggtgtcaataactgcaacagtctgtacgtctttgcacatattaacacagcggcggcatagaatacatttattattatccctcacaattgacggtgacacgtcgtctatttcgaaactgttcatatcgccttcaaacgctattgaatccactcccagctcttctgacagcgactgcagttcacagcttttgttccttatacagctgagacattttttctcgtgagttgacaacaaaagttcaagtgtgacgcgcctttggtctctgacctttttagtgtttgtcataacctcaagcccttccgacaccggataaacacatgccgcctgaagagccctcgcacctttaatctcaacaatacacattctgcaagaaccggttttgctgatgtctttcaaatagcacagggtaggtatatcaatgccattttcacgtgccgcttcaagaaccgtatagtcggcaggaacagatagttctattccgttaatttttatatttacattatctgccatctctatctcctcctatttggttattgccttaaagggacacttctcaagacaagcgccgcacttaatgcatttttcactgtcgattttaaaaggatttttaacctgtcccgaaattgctcccaccgggcactgtctggcgcaaagcccgcagcccttacacttttcagggtcaatttcatatttagcaagccccttacagacatgtgctgggcaagtcttatcaataatatgcgcctcatactcgtatctgaaatacttcaaagttgaaagcaccggatttggcgccgtctgtccgagaccgcacagcgaaccggctttaatagcttcagccaggctttcaagacgatctaaatcttccattgttccgttgccgtctgtaatcttagtcaaaatttcaagcagtctcttggttccgacacggcacggagtacatttaccgcaggattcgtcaactgtaaactcaaggaaaaacttagctatatcaaccatacagttgtcctcatccataacgataagtcctcccgatcccatcattgaaccaatagctatcagagaatcatagtcgattggagtatcaatcaattctgccggaatacatccgccggatggtccgccggtctgtgccgccttgaatttcttaccgtttggaattccaccgccaatatcttcaacaatttcacgcagggttgtgcccataggcacctcaaccaatcctgtattattgatttttccgcccagagcaaacacttttgtgcccttactcttttcggtaccaatttttgagaaccagtctgcgccttttaatataattctcggtatattagcgtacgtctcaacattgttaagtatagtaggctttccgaacaaacctttaacggccgggaacggaggacggggacgcggctcgcctcgatgaccctcgattgaagtcatcagagcagtttcctcaccgcagacaaaagctccggcgcccaatctaatttctatatcaaaatcaaatccgctgtcaaatatattctttccaagcagtccatatttacgggcttgttttatggctatattaagtctctgaaccgcaatcgggtattcggctctgatatatatgtatccctggtttgagcctatcgcatagccggctatagccatagcctccaaaaccgcatggggatctccctccaaaacgcttctgtccataaatgcacccgggtcgccttcatcggcattacaacagacatatttctgctcgtttaccgagttagccgcaaattgccacttcagtccggtcggaaatccgccgccgcctctgccgcgaagtccggaatcttttatagtatctataacttcctgaggcttcatctcagtaagcgctttacccaaagcttcgtatccgtctcttgctatgtattcatctatattttcaggattgatgacaccgcagtttctcaaagttatacggtgctgctttttataaaaatcaacttcattcagcgactttatttcgtcagtgccctcatgtacagactcatcatacaaaagtctctgcactattctaccttttaagagatgctcttcaacaatctcttttacatcttccttttttaccatgctgtaaaatgcgccttcaggatagacaataactatcggtcccagcgcacacagaccaaaacatcctgtcttaacaacttttacctcatcatataagccgttttctttcagctgtttttcaaactcgtctataagcagtgcactgcctgaagaagtacagccggtacctccgcagacaagcacttgtgatctatatatgttcattggttaattacctccagtctgtgccgcaccaatagtatattccatgaccggcctgccgtttactatatgttctgtcactaccttagccaccttatccggcgtcattttaacatatgtgaccttctcctcgccgggtttaaatatttcaacaatcggctccagcctgcacataccgatacatcccgtttgggtaacagtaacgccgcttagaccgcgtttgtttatctcctgcaaaaattcattcagcaccggtctggctcctgccgcgattccgcaggttgccatgccaataacaatccttgtatcattatcattgtcattacgcaaatccatctggttttgaaccctgtcacggattgctttcaattcttccaaactcttcattttttgacctcctactgtcaataaatctatatatggaatttattatttactaatttatttgtcttctcttatcttcccgagcccctctgtgatataatccattatccaggacagaacctctgttgaatccagtggaacatcgcctaaaatttcttttatttcctgggtgtcaaacacaaactccgaatcatttaccctatgtatataaataaaatcaatctccggattaacagacactaaagtgaccattgttcctgccatatcgccgacgggagctctgtcaatattattatactggaatctggcagtgacacaagtgccaacgccctcgtcggaagtaatctcaaggcttccccccgcctgctgtgcggcgagttcaaaaagaggtattcccataccaaccctgcgtgttgttcttgtcgttgtaaacgggtctctgacacggcttaaaaattcaggactcattccgcatccgttatcagacacaacaatcgtcagtttatcatcatcaatattttcatcaataattatttcaatcaatgtcgcttccgcttttactgaattctgaacaatatccaaaatattaagagatagttctttcaatcagctcaccaccaatcaattatttatcaaatagttctatttattaaacagttcatcaacactgttaagttcaagaaaatttttctgtcccggcatactctcaagatagtgagcgtccgagtttctaagtattttatactttttcaagtcaggacgcatgcgcagataagcttccaaatcctcaacgttctttgaaacttctatccacttcacaggtatgtcttccgggataaatcccaggttagacagcacgctgtatgaatccctgtcgacatgggccggcgaaaacaatccgcccgcttcactaactatataaaaaagttcgcttatagatatggaagccgacgatatgagcagttttttctcatagtcaataatattgtcgttttcatccatataagcctgaattccaaaaatctccggcttattttctatatccggaagccggctgtatacaaaattcgaaacttcactagcacgctccatattcggatacagagtaagcacatgaacaccctcggaagtttccacctccatacccggaacaacagatacgcctatattttttcctgccttcataacagcttcagcatttccaatagtgttatggtcagttagagctatggcgtcaatctctaaaagcttagccatattaactatattacccggagtcatatccatactgccgcagggcgacaatgccgaatgaatatgaaaatcatagctaaacatttttactgcttaatttataataatcaacagccgcttcataactcgtttttgctgtcttcaaaataacaacgttttgggaattggccttatctataattccgctttcaacatccacatcctcggcaagaacaatacatgaagcgtctgacaatgtggcaacagcaacaatgtttatattgctcataacggtaatccacatatctccgctgttagctctgcccattacccagctcagcaaatcaccaatataacagccagtaatttctttatcctcatagtcaggattggttaaaacttcatactcgccaaatttaactaaatctgatattttcatagagttactcctcctcttcacggttatctttatctgacgccaaaagctcagtagcaagttcctgaaccttagctttcatatttactatacaaaaactctcatcggcaaaacctctcactatatcctcggccaaagctttacaggacggagcgccgcatgatccgcagtcaagctgaggcagagaatcatatattttctcaagctcatccatcatttccatagccttgtcaaaatcatcatccagttccataaccggctcatactccagcttttttgaacatgacagagaacccaaatctatatcttttgtttcgcatggtctgttgtgtaaagtttttgatatattctttatatgatttttagctacatagctattgacaacattcaaaacgccgcccacacatccgccgagacaagctgacagttcaataaagtcaataccggaaaccttatcgtcttcgatttcctcaagtattttaataacattttcaattccgtcaacagctatataattttctatagccgcgccgtccgcttcccctccgcttctggaccaatatactccgctcagggaagatttcataagagcttttggctcctttatatctcctataatcggaaaaagctttgcaaacacatcattaactgatattgccccgcttatttcagatttatccaaagtcaacggagattttatactggtcattttggctggacatggggttataaaaaacaccccaatttcttcatttttaagtccggtcttttggacggcttctttccttgctaaacgaccggcagtttccattggtgaaataaggtcaataatgctgtcaatcagattagggaatctgaccctgataagccttataacagccggacacgcactgcttatgaatggctttgaaccgcttcgttttttatatatctcttttgtcgccgcgcttatatactcggctcccctggcaacctcaaaaacatcgtcaaatcctatttttaaaaggccggtgagtataacgtttatatcgcttacatcgctgaactgtccgtataaagaaggcgcaggcaaggcgatattatatttataatttttcagttcctcaaaatcatctgttaccgcccgttttgcatggtatgggcaaaccctaatacattcgccgcagtcgatacagcggccttttattatcttggcttttccgcctctgactctgatagcttcagtagggcagcgctttatacaatttgtacagcccctgcacttatctttatcaagtgtgacggaatgaaagtatgacataccctcacctcatatatttataataagttctaccgttgtacctaccccaacttttgaatctatattcatgccgtccgtatattttttaatattaggaagccccattccggcgccgaaacccatttcacgaatttggtcgctggcggttgaatacccttcctgcatggctaaatctatatctttaattccggggccatggtctctgaaagtaatcgtaattctgtcctttgacacctcggcgtcgcatattccgccgccgccgtgtattattgtatttatttcagcttcatacatcgctatggcaactcggcgtataacctcaggcgctatacccagcttcttaagataacttttaaaattgctggaagcttcccctgctatcgaaaaatcatggccgtctacatcataatgtttctgcatctttcctgccctccaaaccctttctgtaaagtctgccgcatgcggtatacataggcagctttgtgcttagaaggactattccctgctctttcgcaagctcaataagactttcgggcggagtttttcctctaacaaaacatatagctatgatatccatcatctctgcagttctaacgacctgtggattaacaagcccggtaagcaagagactttggtctttaacaaaagccaacacgtcgctcatcaagtcactgccgcaagcgttatgtatatcaaccgctccaaggctttcatcattttctccggtcaagacctgagcatttatttccgctttaacatcagataatagcataagccacccctttatacttggttataaacagagttcaaaaatttgaacaaatatattaacttaatgcacaactcacaactcataattcatatataaaaatgaattataaattataaattatgcattaacttttattctactgatactgttttaatatatcctcaacctggtcggcggtcaatctgccgtgaacatcgtcaccaatagtaataacaggagctaaaccgcacgctcctatacacctggtagcgtccaatgagaacttgccgtcagctgtgcattctccaacatctatgcctaatatttccttcattttatcaagtatttctccgctgcccttgacataacaggctgttccaagacagactcctataggataaacccctttaggattaagagaaaattgggtataaaaagtaacgattccatatatttctgcaagaggcacgtcaagaccctcagaaatcatttcctgaacctcaataggaagatagccatatatctcctgggcttcgtgaagcaccggaatagtggcacctttctctcccttatgagattcaatcaccgctttcagctgttcctcttgttcctttgttcccttaaatggtatagccattttatgagacctcccgtatgtaatatttactgtatttcctatatttagaatggtctgaaaaccacattcacaacatagcccagactttataagtgtatcacaaaaaattaccttttgcaacactgatttttaattatatgttatatatttaacacattactttttataaattaaaataatatatatacctttaatacaaataatataactaaaatataattaaggttgacaagcttttgccttgatgttaaaataatctcacatgatgtattatgaaatggagaaagcaaaatggaaacaagatataaatcacatttatacgtatatttaataatctgcggagcattgtacgtagtcttttctactctcagaagcggcggagatttacaaggatggtttaaaggcgtttatttctttttatcattaatggtaatggtgtttgcatattttaacatcgcaaaaaaaggggataaatacataaagacttatcatcacgacctatatgacagatattataacgttcttgtcactggaaagaaagaagttaaacgtcctattttcattggtcttcaaactttatttaatacggattatgaaaacgacccaaacttaaaggcaatacgaaaagaagctaaattatatatctgtgctttgataataatatttatactaacgttaatgaatgttgcactgtaacaaaaaatattattgaatctgttattatattaaaaaatataataaattaaaaagaaccaaacagaatataaaaagactataatcagattgtcatacagcacaataaaatatataaataataaaaaaccattgtatttagacaataaaagtctttttacaatggtttttattgtttttcttaaaaatgactttttacagtcattttagagtttccaaaacttatttcttattcgtactctaccacgttaacccatctgtctaaaaattccttttcttcaggcttgccctttacagactgcgatgccgcaacaacaggcatccatttctgaacatactgttttgccgtgtcgctctttttgcagaacaaatcaagatatttgtcagcaagctcctccttgccgtctaaacaaaacagcaaatatgttcttgcaacatcagcgctggcgtttccttgtgtagcgtgtgaccagtcaagaatatatggggttccgttatcggtgacaataatattgctcgggttaaaatcaccatggcaaagctttgtatgctttggcatactctcaaggcgggtgtgcagctcatatctcgtagtagcgtcgtacccggactcgcttatttttctgttcatcttatcttttaacttgttcaaaagaggaacagtctccttattcatttccagctgcaaatcaacaaataagttaagatattcatcaagtttctcaggattctcatccattaactgggcaagcgtttttccttcaataaattttgtggaaataacccactgtccgtcaatcattgtaacctggttcagcgcaggtatatttaatccagtttcctcaactctggcctgattcaacgcttcgttcaatatatctgctttagaataattggaattaaaaacttttaaagcattttcgccgtctttataaataaccttatcgggtctctcggcaagaattttttcgtacttcataattgtttgctcctttcagaatcaacgtgacctattgttaacaatatcaaataatgggttttgccctttatccaatgtatcagcggcggtttgcggcgctgaaaatttaagcggagctgccaacggcaggatactcttaaattaattcaataaggggttttgccccgttattcaatgtttcagcggcgaattttcgacgctgaaaatttaagcggagcccgccaacggcgggattctcttaaattaattataacaaaccaacaacggttaatcaatatttatttgccgtagtaagcccttaaatacatctctttaatttctttcataagcggatatctcggatttgctccggtgcactgatcatcgaatgcctgctctaccatttcgtcaagcgtatccaaaaatactttttcgtccactccataatcttttattgtcttcttgattcctattttctctttcagttcatttatgcctttgataagattctcaagtttttcttcatcagtctttccgccaaaccccagataatcagcaacttctgcatatcttgccaaagtatgaggatggtcgtattgtgagaatgttcccatctttgtcggaacctcgctcgcattaaatctcataatctcttcaagcatcaatgcgtttgcaacaccgtgcggcagatgatggaaggctccaagcttatgcgccatagagtggcaaatacctaagaaagcattagcaaacgccatacctgccatagtagcggcatttcccattttttcacgcgctaccgggtcatttggaccattatcataggctctaggcaaatattcaaatatcattttaagactgcgcagagccaaaccgtcagtataatcagttgccataaccgaagcataagcttcaagagcatgtgaaacagcgtcaatacctgacgcgctcgttaaacctttgggcgcattcatcatcatatcagcgtcaacaatagccatattcggcataagctcgtaatcagcaagcggatacttaacaccgctgtcaccgtcggttattactgcaaaaggagtaacttcacttccggtaccggcagatgttggaactgctacaaacatagccttttctcccattttcgggaatgtgtacacacgcttgcgaatatctataaatctcattgccatatccataaagtcagcctcaggatgttcatacagaacccacataattttaccggcgtccattgcgcttccgcctccgattgctataatacaatcaggctcaaacgccgtcatagctttggcgccgtcgatagcgcaggcaagggtcgggtcaggcgctacatctgaaaatacgctgtacttaatccccatttcatccaacttgtttgtaaccgggtcggtataaccattgctgtacagaaaactgtcagtaacaataaacgcctttttcttacccataacgcctaactcttcaagagctaccggcagacagcctttcttaaagtaaaccttctcaggagccctgaaccaaagcatattctctctcctctcagcaacagtttttatattaataagatgcttaactcctacattttcggacacagagttgccgccccatgaaccgcatcccaacgttagtgacgggtttaaatcaaagttatacaggtctcctatacctccgtgagatgacggggtattaaccaatatacggcaggttttcatagcggcctggaacttgttgagtttatctttttcagtaactgcattcagataaacgcttgaggtgtgtccatatccgccgtcagcaattaaatgctccgccttttctatcgcttcatcaaaatctttcgctttatacattgcaagaacaggagacaatttctcgtgtgcaaactcttcgctgagttcaacactgctgacctcaccaattaatatcttagcagtttcaggaacgtcaactcctgaaagtttcgctattgtataagcagactgaccaacaatctttgagttaagcgctccatttatcaaaatggtctttctaaccttgtcaatctcattctttttgaggaaataacatcctctgtcggcaaactcttttttaacctttgaatatacggaatcaagcacgataaccgactgctcagaagcacaaatcataccattgtcaaaagtctttgaatgaattattgaacttactgccaaaagaatgtcggcagtatcatctataattgcaggcgtgtttccggctccgacaccgagcgccggctttcctgatgaatatgcagccttaaccattccgggaccaccggttgccaaaatagtatcagcttctcccataagcatgtttgtgagctcaagcgacggaacatctatccatgaaataatattttcaggcgcaccagcttttacagcggcttcatatacaattctcgccgcgtcaatagtacattgccttgctctgggatgagggcttatgataataccgtttctcgtctttaaagaaatcaaagtcttaaaaatagctgttgaagtcgggttagtagtcggtattactgcagctattacgcctattggttcagctattctctttgtaccataagcggaatcttcttctataacaccgcatgtttttgtgttcttgtatttattgtaaatatactcggctgcatagttgttttttattactttatcctcaactactcccattccggtttcagcaaccgcctgctttgcaagcggcagtctttgtttattggcggctatagcagcagccttaaatatttcatcaacctgtttctgtgagaacttcgcaaactcctgctgagctttccttaccttttttatttcctgctcaagttcctgaactgtacttaccataagttcttactcctctcagatatataaattaattaattttcttagtgaagcctaaattaggcctaataacaattatatccataatatgctaatcataaatcacttttctgtaaatattataaaaacttaacttttactataaataattaatgagattcacagaataaagtgttttgcttttattctttattacggaataaattgttaaatatttgtcaatctctttacaatacacattatacacacttgttaaatatttgtcaatccaatttaaaaaacatttttcacaaaaaataattatgacaaatcagctgctttgttaaacttttatctaacttattgtttagataaactatcttataaattctgaaatttaacaatagatgacatatgtttttatgatatagaagttaactataattaaaataatttccgttaccactcatctttcacggctcttatcaacttcttttaaatacgcagtgcgaaagcagtttgctgcgtaaagttcacaatatcggaaaaatttattagtaaaaatatttataacaaatagttttaaatattttcacgctaagcgtgatatgatagctcacctaacgaggtgtgcttacgcacaccctgccgatgttcactaaaaacaccttctgatactaatctttcgttttaaatttaatataattaaaaaagtattgtatttatacaaacattttcagattaaaattgtttgtcgcagttgaaatttaaacaattttttctaaataaaactttataaaacatttactgccgctccttgctataatcggaatgataaaatcttcaaataaatcatataaaaattttaaaattctttctttattgatattagtaaatattttgtaatattaaaactaaaaatatggattgaaaaaaatattaaaaagcgatataatatataatgtattaatgtggcaatttaaacatatataggagataaattatgctttcgaaaaaaataatctggaaactaaatataatagatatcttgctgcttgcaattattattctcagtgtcgccgctcttatatacaaatcagcttggggcaggggaaacaataaatatgaaacctacactattacctatgtatgtgaaagctcgccaatcgacctgttaaacaaagttgaatacggcgacatttgcattgacggaagctatggtaatgaaataggtgtgcttgataatataaatcttactccaataactgaaaattattccgtagccgcaatatcaaacgggagcgttgaaaataatgaaaacgatgatgaagaccagccgtctcccacaccttttccaacgcctgagcctgttcgggctaaagcagaatttgttacaacggttgaaggcatgaagacagaccacggtataaaaattgataaaaacatttatttgatgggtcaatctgctcaaatcattattggtgacgtaatttttgatgtctatatcagcgatattcgttaatgagatttttggaggatataaatgtgagacaagagataatagacatatataaaaacagttttttatatgagataattatgtggatcacaaatattctgattccgcgtctgaaatacgattttattcacagtaagactttagcaattataacttggtttgaaaaaaaaattatgaataataagtatcttgaaatattttttaatactaaagttgtcggcgaagcctggtatgcaagtgcgttttacagatataccacaataggcatacgccggtttgctttttatattccccgttcaaggctcaagtttcatcctatatatataggtgtgtttctgctgtttgtgcttttattcccatcatctctatgggataatttttatatggtcccggctttcatgctcgtatcgctgatttatatttctcataactccactcagcgcacaggcgttatatttattctgataaacataattatattcatgtttatagctatgatgagcatgtcaataccgattgcggcttgcaaatccctttcatactttttattggctgttgatttattttttctgatatcattcacagtcagaactcaggatgatttagaattaattttaatgtctcttttcctggcaatggtcgttttgtgtataaccggaatagttcaggcttatcatgccgacaatccgagcatagctatacaaggcgtttacggggattcgacaatttttgctgagatattggtgctgctttttcctttcgcatttgtttatcccataactttagaatctaaaatcagacggtttatatattcaatactggttatgggagtatctttttgggttatctcggccacacagtctaaagccgcgttcattgcttattttatcgagcttgttatcgtaatcattttgactgacagacgttatataccaatgattctgtttttggcgccgttcttttcagggcgcgtactcaacaacattatattaatgtggcaaaacggcagcaataatggaaatattattgaaaacattgtctatactttgagaaatttctggacaaatggatttggagtgagcacagacaactttgtcaacatatataattccacagctcagcattacggggaaggcggcactttgataaacatacccaaccttcacatcagcgctgtgtactttaacattctaatagatgtcggcgctgtatttatgattggatttatgtattatattttaagaattgcacactcttccataacatgtatgttcagagccacaccgcgccaaaaaattatatttgccgctggacttgccgctctgcttggaatttctatttcttcactgctggattctaacttgtttgaacctcgtattcttataatgtattgggctatgctggggcttcttcgctccggaagaattataaaacttggggtattagactaaaaaccgacaaaatttctaattatgtattgacgaaacaagttatttttattataataaaacatacgtaggcaaggagggttaacgaatgaaaacagaaaagcttttcataacagctttgcagaaagttagttttaaagcatttgcgattgctgcctatattttattgtttatctcacagcgcttgccgatgtttggaataaattcgattgaactgaatgatgtaactgaagggttcagcatttcatcaatcgtttttggtatggtttcaaagttttttgacttttttggtgtgactactccgcctgaaatacagcttttgatgataggctgtatagtgctcctcgtttttggtcttgctgctcttataatgtctttatttggatttagacttattcaggttataaacttttgtgtatcggccgttggaacacttttgagcataggattttctgtattggttacacttggtatttcaagcataaattcatctgaaattggtgaaattttagagtttcaactatatgcgtcaatttggctgccaccgatatttttcttaatcggaacgctgtttacatatgcttttgccaaaatgcctgactacgctttggctgaaggaagatttttcagaactatcggcgccgctctgaatcctaaatactttttgagaacttttaaaaaggatgataacacagaagcattattccgtgccagaactcctttaaaaaagaaaaagtatgttactgtctcggagccaaaaatcttgaaaaaagctaaaaaagctgaaaaagccgtaaagaaaaaaaagagaaagaaaaaaactgagcctgttacgataacaccgccggcaaaaaagctaacagctttagagcttgctttagccaaacgagaacatgctgaagcgcttgcaaatatgcaggcggatgaggagaacaaggcgttattttcaaaaagaaatgctgctccagattataacaaaacatattcaagtaaaaatcaaattcaaaacagaaagcaagttaaaaataaaagagcgctggaactggcaaagttaaaagcctcccacgctgaagagattgcaagcagaaacgaagatttattttaatcaaaagcaccgaactatatatgttccggtgcttttaatttatatattcaattcaaaattattatatctatattttaatttctaaaaagatacgtaaaaagtttaagtcagacaataataacaccttcatcttaagtgtattatatacactaattttcttatattactactaaaatatctgtaacccaaacacaaaaaatattatatatattttaatggacactttgtactttagattggaaatgcagtacagtatatttttcaagtttttattacacttttcatttttatattaacgctgttcatgttataatatatcataaaaaaatatctaactcgttttaaaaaatattatttcgtcttcaaaatattaaccttaaagatataatacaataaattaaattgtaatatacacattccagtattgtccgcaaacatttgaaaatctataataaattaaacggctttttatctaatttatttcaaatttcaaaggcttaaaaaacctctttacagcccttgacacatcctttaaattagtatacaatattaaggttaattatcgaaaaaattaatgagtatataattttgttaagaattaatttattatagaattggagggatttaaatgtatcgcaaagtatcaaccgacctttcttttgttgacagagagaaggaaatcgttgacttttggaagaaaaacgatatatttaaaaagagtataaagaatcgcgagggagccgaaatctttactttttttgacggaccgcctaccgctaacggaaagcctcacataggtcatgttcttactcgtgcaattaaggatttgattccaaggtaccgcacgatgaaaggatacttggttgagagaaaagccggctgggatacccacggtctgcctgttgaactcgaggttgagaaaagccttggcatcagcggcaaacctcaaatagaaaattacggcgttgaagactttatcaaaaagtgtaaagacagcgtctttgtttaccaaagcgattgggaagaaatgagtgaccgcgttggcttttgggccgatatggacaacccatatgtaacataccacaatgattatattgagtcggtttggtgggctctcagacaaatttgggataagggacttctctataaaggtcataaaatcatgccttattgtcctcgctgcggaaccgctctgtccagccatgaagttgcacagggatataaagacgttaaagaaaattctattatagtaaaatttcagattaaagatgctccgaaaggcgagtatattctcgcatggactaccacgccatggacccttccctcaaatgttgccctatgcgtgaatccgtcagagaaatatgttaaaatcgaatgcggagatgaaaagtatattttggcaaaatccctgcttgaaaaggttctgcctaaggactgcgaatataaaattttagaagaatatattggcacagacctgtgcggtatgcattatgaaccattgtttgattttgcaaagcctgagggagacggatatagggttgttgcggataattatgtcactatggaagacggtaccggtatagtacatacggcgccggctttcggtgaagatgataaccgagttggagttgaaaacaaccttccttttataaatcttgttgacagtcagggtaagtttgttgacggcacaggagaccttagcggactttttgttaaggatgcggataagcttataattcgtaatctaaaggacagaaacttagctttctcagtaattccttttgaacacagctatccgttctgctggagatgtgacacccctcttctgtattacgcttgcgacacatggtttataaaaatgactgccgtacgcgatagacttctcgctaataatgagaccgtaaactggatgcctgacaatattaaacacggacgttttggtaacttcctggaaaatattattgactggggtctgtcacgctcaagatattggggaaccccactgcctatttgggaatgcagatgcggacataaacatgttatcggctcaatagaagagcttaaagaaatgggaataaactgccctgatgatattgaacttcataagccatatgttgatgaagttaaattaaaatgcccggaatgcggcggtgaaatgacccgagttcctgaggttattgactgttggttcgattcaggctctatgccgtttgcacagctgcactatccatttgaaaataaagaactgtttgaaaagcatttcccggctgattttatcagtgaagctatagaccaaaccagaggatggttctacacattaatggcaataagcacattgctgtttgatgaatctccttataaaaacgttgttgtaatgggacatgttcaggacgaacacggaaagaagatgagcaagcacctcggcaatgttgtcgctccgatggatgttctaaatcagcagggcgccgacgctatacgctggtacttttattccaactctgctccttggctgccgaaccgtttctcagaaaagaacgtgtctgagtcacaaagaaagttcctgggcactctatggaacacttatgctttttatgttctctatgcaaatatagatgaatttgacccgacaaaatacacgctggatattgataaactttcagtgatggataaatggattctttctaaattaagcggtgtaataaaagaggttgacaataaccttgccaattataaaattgttgagtcagccagggctataacacaatttacagacgagctgtccaattggtatgtccgccgcagccgtgaaagattctggacggttgaaatgattcaggacaaaattaacgcatatatgacgctttatactgtcttggtagaattttctaaagtatgcgctccttttgtaccgtttatgactgagcaaatatatcagaacctagtattgtcggttgataaaaacgctcccgaaagcgttcacctttgtgattatccgtctatggatgaaaagctgtctttccctgaaattgagaaagatatggacgctgtcagaaaagtggtaatgcttggccgcgcatgccgtaatgaagctaacataaaaaaccgtcagccgcttaaaaagctgtatattcaatcaaatactgaaattaatccggactatatttatataattctcgatgaactcaatattaaagaagttgagtttgttgaagacgccagcggatttatatcatacaaatttaagcctcagatgagaacaatgggtccgaagtatggtaaactaatgcgtccaatattcgacgaggtggctaagatggatggagcagaggttatgtctgttctaaattcaggaagcccgctgaagctcaatgtacaaggcactgacgttgaaataacaaaagatgatgttttgattgaaacccaacaaatgaatgggcttgtttcagacagtgacggtggatttaccgtaattcttgacacaaatcttgacgacgctttgattgaggaaggcttccttcgtgagataataagcaaacttcagacaatgcgtaaagattccggatttgaagtaaaagaccgtataaatatccactttagcggaagtaataaaataaatgatatatttgttaaatttactgatgaaataaaaacacagactttagctgatgaaattcaaaatcaagacaatgacggaaaagaatgggatattaacggtgaaaaagttataatctcagttgaaaaagtataatataatagtataataaataatctaagggtcaccgatagaatttttctattatgtgaccctgattttatactttaggaggagttttatgaaagcgttggttacaggtgcaagttccggtataggacgtgatatagccgagaaattaagtgatttaggttatgatattatacttgtcggaagaaataatgaaagacttcaaaaaacagcggattcgcttaaaacgaaatcatatataatatcctctgatttatcggacagaaacgcttgtcttgaattatatcaaaatgttcagggaatcgctaaggaagacgatttggaaatagtcataaataatgcagggttcggtttgttcggagagtttaacaatacaaatataaatactgaacttaatatgattgacactaatattgccgctcttcatattttaacaaagttatttctaaactattttataaaaaaagacagaggatatattttaaatgtggcctcttctgctgctttcatgccggggccgctgatggcaacttattactcaacaaaagcatatgtgctaagacttacccaagctatagctatggaactcaggcagagcagttcaaatgtttacattggcgcgttatgccccggtccggtaaacacaagtttcaacaacaccgccggagtaaaatttgctattaaaggacttaagagcgctgacgtggcttcgtacgcagttaagaaaatgtttaagaaaaagactgtcataatacccggaaccacaatgaaactaggaaaattcggccttaggtttttacctgacaggctcgccgcaaaagtcgcatacaatattcaaagaagcaaaggttaaatttttatatagcatttatactaataattaatttgcaataatagcttgcttatcagcaatctcagactgaaaacaaacgccattgcggaatattccacaatggcgtattagactgttattaaagtataaaagtttttgtaatatgcgcaaaagccaaatctttaaacctctagtcatagtagtaaaagaacgttcccttaacatcaatgacagagttttttaacatataaaaatattaggataaacatcttatatccaaaactcattagtaattcttaggataactgtttatccttccattattttcacatataccgttcttgaagtcttaaccctttcaaactcacatagataaatcccctgccaagttccaagaagcagccgtccgttttctataataatattctgtgaaaagccaaaaagccctgacttaatatgagctgctgaatttccttcataatgatgaaagttggggtcatcatacggcacaagcctatctaaagtcatcaaaatatcactttgcacatcagggtcggcattttcgtttatagtcaatccgcaggtggtatgaggaacatagacggtgcaaagacctgaattaacgcctgactccttaaccgattcctgaacctttccggtaatatctatcatttggtctcctctgcctgtgtgtatatttatcttatatagcataaaatccacccctaaaacaaaatatatttattgtaattgtatcacaatgacaaaaagcggtcaagtataacaaagatgttaaactcgaccgcttaaatatttaaaaactaatcctcaatctttctcagatttattttaccattcggctgaatctcaataacttcaactttaatcatatcgccctcgtgaacgacgtcagtcactttttcaactctgccttttgccagctttgaaatatggacaagaccgtcagttccgggaagtatttcaacaaatgcgccaaagtccataatcttaacaaccttaccgtcatatatttctccgacttcgggttccctaattatatcctctatcatctttttagccagctcaccggcttttgtgtcaacggctgctatataaatacgaccgtcttcttcaatatcaatttttgctccggtatcggcaacaataccctgtataactttaccgccgctgcctattacctcacggattttgtcaaccgggatagccatattaatgattttaggagcatactctgaaatatcttctctaggctcagctatagctttaagcataacttcatcaagaatatagaatctagcgtttcttgtctgttctaatgctgtttttataatatcaggtgtaagaccgtcaaccttaagatccatctggattgcggttatacctttcttagttccggcaaccttaaagtccatatcgccaaaaaagtcctctaatccctgaatatctaccatagtgataaaattatcatcatcttcagggtcggttattagacctacagaaataccggctacaggtgcctttatcggaacgcctgcatccatcaatgataatgtggagccacaaatactgccctgtgaagttgaaccgtttgaactcaaaacctcagatactacacgaatagcatacgggaactcatccacgctaggcagtacaggcaaaagcgcgcgttctgccaaagcaccgtgtccgatttcacgtcttccaggaccgcgtgacggtctggtttcaccaacactgtatgacgggaagttatactgatgcatataacgttttgattcttcaagaccaacaccgtcaattgtctgagcgtctccgataggagccaatgtggttacagacaaacactgggtttgtcctctgctgaacaaaccgcttccatgcactctaggcaaaagaccaacttctgatgaaagaggtctaagttccaggattcccctgccgtctacacgtttcttttcatacattatccagtttctaactattgtcttctggagcttataaagagcctcatctatttggtctttatattcttcctgcggatatttatcctcaaaatgaatataaacgtcttcatatacaacaagaagtcttgcgtctctgacagtcttgtcatctgtgtcgagcgcctgtttaacctgctcctctgcatagtctcttatatcatcaaacaaagcctgatcaactgtaacatgctcatattcaaatttcggctttccgatttcgtcaactatcttttgcaaaaaggcacaaatcttcttgatttcttcatgagcaaacattatagcgttatacatatcagtctcagagacctcattggcgccggcttctatcataacaactttcttagcgcttcctgaaacaacaaggttaaggtcgcttgcttctctctgctcaacagtcgggttgataatgaactcaccgtctatcattccaacatatacagcggcaacaggaccgttaaacggtatatccgaaacgctgacagctatagatgaacctatcatagcacagaattccggtgaattatcctggtcaaccgaaacaactgttgaaacaatagaaacatcgtttctcaaatcctttggaaacaaaggacgcataggtctgtctataacacgcgacgtcaatatagcgtggtctgacggctttccttcacgtctgttaaatcctcccggaatttttccgacagcatacattttttcttcataatcaatgctgagagggaagaaatcaataccatccctcggcttgtctgacgcagtagcacatgaaataacaactgtgtctccgtatcttactattaccgaaccgttagccagtccagcaaccttgccaaactccaaagaaaggggtcttccggcaacttctgtttcataaatctttgacataaataaacctcctaaatattttaaaagagaggcccgtttagcacttaaaaacaggcattatcagcgccaatgcatatttttaactgctaaagtgagctcacctctttgtttacaaaataaaccaaaggcaacccacgctgaaaaatgcgcaggctgccgtcaattgtttttaatgtctcaagccaagcttttcaacgatagcacgatatcttgtaatatctttcttttcaagatacttcaagaagctacgtctaacaccgaccattttaagcagaccacgtcttgaatgatggtccttcttatgaatcttcaaatgctcatttaagtgattaattctttgtgtaagaagagcaatctgaacttcaggcgaaccagtgtcgcccgggtgtgtagcgtatttttcaataatctcctgctttatgtccttatccatgttgtgtcacctccatattatattagccccttaaagcttagtagagggcggtgaatccatatcccaaaacttaagccataggttaccgcaggttataataacacaattagaaattgttgtcaagcattttttccaaatcttcttcagatataacatttattcccagcttatttgccttgtccagcttactgccggcttcgtcgcctgccaaaaggtagtctgtcttttttgatacgcttgacgatactttacctccgttgtcctcaataagtttctttgcctcgctgcgtttcattcctggcaaagtgccggttattacaaacgtttttcctgaaaatataccgcctttttccactgcttcataagtcatatccactccgcatttgcgcagatgttcaattaactcaatacttgcagattcagaaaaataatgttctacacttccagccattttttcgcctatatcagggatttctgcaatttgctcggcgtttgcttcagctacactttctatggtgccaaaacgttccgctatcagctttgcagctctggaaccaatcagccgtattcccagcgcaaacaaaagtctgtcaaggcctctggatttggagttttcaatagactcaataaggtttgaagcggatttctcagcgaacccctccaaacttactatatcgtctttttttaactcatacaaatcagcacaggtcttaaccaaaccctcatcaataagcttctcaactattgccggacctaagccgtcaatttccatggctcccttagaggcaaagtgaattatgcttctaagctgctgtgccggacagtttgaattcgtacatctagtagccgcttcatcatctattctctcaagaggttcgccgcaaaccggacagtcatccggcatctcatatttggcagcgtcaggcttcctcttatcttttataacctcaacgacctcaggtattacgtctccggctttttgaattattatatggtcgcctattcttatatcctttgaatgaataaaatctatattatgaagagtggcccttgataccaacgaacctgcaactctcacaggcttaaaaacagcgttaggcgtcaccgctccggttctcccaacttgaagcactatatcaatcaactcagtttcctgacgctcaggaggatatttataagctgttgcccattttggcgtcttagaatttgacccaagtaacaaacgctcttccaaactgtttacttttacaaccgctccgtcaatttcaaagtctaaattgccgcgcatttcaccaagcctcattatttcatcatagacctcatcaatcccgtgctgaatccgcctgtcaggaataactttaaatcccaatttccgcatataatcaagactttcgctgtgagtgacaaactccattccctcaacagcctgtacgttaaaaataaaaatatcaaggcttctctgcgccgtaacactgctgtccaattgtctgagcgaaccggcggcggcgtttctcgggtttgcgaaaagcggctcctccgccacttctctcaattcgtttaaacgaaggaacgcgggttttggcataaacacctctccccttacctctaaatatggaatttgttccgtcagctttagagggatactttttattgtcctgaggttattagttatatcctcgccaatatttccgtcgcctcgggtagaaccccgaaaaaacattccatccctatattccaaagaaaccgaaagtccgtctattttaagctctgttacatattcaacaatatctaaaccgagagatgactttgttctattgtcaaaatcaaaaagttcctctttatcaaacacatcagtaaggctttgcatctgaacggcgtgagtaacctgttcaaatccctcaagcacgccgccgcccactctctgactgggtgaatcctgagttttatactccggatattcttcctccaatacaataagctctcgtatgagcttatcatattcaaagtcactgatttcaggagcgtctagaatataataacttctgttcgcttcattcagtatttctttcagttcgtcaatacgctgtttagcttctgttttttccattttttcacctttataaagttaaattatatatttgatattataacccaaaaaacttttagattcaagatgtataatagcacaataaaatcccgcataacaagtcacaggattttataattttaaattatatcaatttgttccttatcctaaagccttgtcctattacttcctttgcgtcagttacaatcacgaaggcgccttcgtctatattcataaccatttttttcaacggcggaagctgatattttctcattacacacattaaaacgtctctgttttttccgctgtacattgaaaatccggaaagcgccgttgaaccgcggttaagttcagacgcaatcatttcggctatttccttattatggtcagaaataacgtacacaatctttgcaaaatttacgccctcgagcattgtatctaaaacatacgagcaaacaaacagcataactattgaatacaaaatcgtgtctaatctctgaaacgccaatcctgccgccaatattactataccgtcaatagctataataaattgacctacagacattgacggaaaccattttttcagcacaagagaaagtatatccgtaccgccagttgtaccgcccgaacgcatagctataccaagaccgacgccatatattgagccgccgaataccgaacagagcagcatatcatttgatattggctgaaagctcctgaatatttcaagttcaaaaaattgagctgatactgaaagcgcaactgttcctatcagagaagtgattaaaaatctagaattaaatgttataaaccctaaaataaaaataggaatattaagaaccaataccattaatccaataggcaggttaaacaaataatacaatactgttgatacaccgctgacacctccggcagtgacctgagacggaacaaggaaaaaatccagagcaaaacccataatacttccgccaagcaatattaacaatatatcctgaactttttctttcaattataccgccccatttgttttataataattgctttaattttattgttatgtaaaattctacgcaaattgttcattgcgttataaaagcaaacaggcaaatctattaatcaaaaatatgtttaagtaattcgcatatccgctcttcttctcccgaaagataaagaaaaccaaacagcgcttctactccggttgccacacggtaatccgacatttcagaatttttcggaacatgtgattttgtatttcttccgcgcttaaacacagacatttctttttctgacagcaaactttctattttcctgaaaaactccgcctgtcccttgcagcaaacatatgttgtagctgatttatgaagcttgtttacattctcatttccatccttaaccaaatagctcctaacatataactcatatatacaatcacccaaataagctaaggttaatggcgaatactgctccggcggcagcttatctatacccaaattctctaaaataacatttatcatatcttttaatttataacaaaccgagacgtaataatattttgtgctatattacaaaacttattcacttatatctcactctgtatcccctataagagatggttcctccaaatcgtattttaatttcttattttaacaaataccgcctcaaaaagaggcggatataataatatttaattaactaaacaggtttacctctcagattataaatttaccactcatttaataataaaatctgattaatttctaatttccaaaagcggtaatcaatttaattataacttaatcaactgctgcccctgagctgtatccttaactgaatagccaaagtctttcagcttatccctgattaaatcagactttgcccaatctttatcggctctcgcattttttctttcctcaagcatctcttttacttcatccggaaccgtttccttctctttgcgcccaagtattcctaaaacgctgccaagctcatcaaaaactgacaatatatattctataagatattcgctcggctcagaagcggaggtaatatttttgtttacttccgacactatctcaaatataactgatatagcgtccgctgtatttaaatcatcatccatagcgtctataaatttctgcttataaccattgaccgcttcaagcacgggaatctcttccggtctcgcgtcttctccgcttgctgtcttctttaagaattttaatgtgtctatacatgtataaattctctctagagcagagcttgccgattccattaaatctttactgaagtttatcggacttctgtaatgcgctgaaagcataaagaaacgaataacttcataatcaaattctttggcaacgtcacgaacagtaaaaaagttgcccaacgacttagacatctttctattgtcaacgtttatataaccgttatgaacccaataattcgcaaactgacagcagtttgccgcctcgctctgagcaatttcattttcatgatgcgggaaaataaggtcctgaccgccgctgtgaatatcaatagtcttgtcaagatatttgttagccatagcgctgcactcaatatgccatcccggccgtcccataccccacggactttcccatgcaggttctccgggtttttgcttcttccaaagagcaaaatccataggttcgtgcttatcctcattaacttctattcttgctccgctctccaaatcctcaagcggctggtgcgatagttttccatatgatttaaacttctttgtgctgtaatacacatctccgtcaacattatacgcataaccgctgtcaaacaatttctgaattatatctattatagcgtcaatattttcagtagccctcggatgaactgttgcatgatgaatgcccagtccctttgcgtcaataaaatattcttctatatatttatcagccagttctttaacagtgattccaagctcattagctttgtttatcatcttatcatcaatatcagtaaaattctgaacgaatctaaccttatatccctgatactccagataacgtcttaacgtatcaaatattataaacggacgcgcgtttcctatatggaaatagttataaaccgtcggaccgcaggagtacatcttaacctcccccggttttataggaacaaattcctctttttctctagtaagcgtattaaataatttcatatgtagaaaaccctttcatctaatttattatatccaatcaatcggtttcatcttctttataatcaccgcactcaatattctcaactttcctatacaaacgctctatagaatttctcaaactgcacaagtccatagataccggatcgggaaaatgaatttggtctaggtctgcgacataaacctgctttgcaggagcaattttaactccttctctttttacaatatgcgccggaacgccaacacatgtgctgttcggcggtatctcattgagaaccaccgcatttgcggcaacttttgaattatccccaacggtaaatggtcctaaaatcttagcgccgctgcctattgtaacattattacctatcgttggatgacgttttcctttgtccttaccggttcctcccagagtaacaccctgatatatggtacagttatcaccgacaacagcagtttctccaatcaccacacccataccatggtcaataaacacattcttgccaatttgagcggcgggatgaatctcaataccggtaacttttctggcgtgcatagatacccagtcggctaaaaaatatcttcccataccatacagcttatgtgcaattctatggtatataatcgccttaactccggggtaaagaaagaatatttgagccttggaacgagccgcagggtcacgttcaaaagtcaaatgtatttcattcttgattaacttaataattcccataaacatactccattatgccaaacagggcaattttttgatataatatatttatattgaacctggcaacaattataacactaatcttcttgtcacacaatagttaatggataaaattttccgtttttttctctgtagtatttataaattatatcaaattactaatatatagacaacgtaaaatgctgttgtttaaaaactcaataaaaagatacataaagaataaagatttattttgttatattgtttgtatgaaacgtacaggcataatatttaatttggaaagtcaacagaaaactagacaaaaaattaaaggtgtgaataggctacaattaattggacgaaaaaataaaggaacgtctcagtgaacaacggtagggcgtgacccacctgcaaggagcgtgtgatacaaagtgacttgttttgaataacctgtaatgtcattattatgaatactcaaataaaagaaaaagtgcttgcttaggtctcctacggctccaagtggcgctcgcaccccgctaatttcttttgtgcgtggagcacaaaagaaaaagccatgttactttcccgttgactttgtgtactactgtgaataaagatttacagagttccaattgatttaatactcaaaaaagttgaggtggtcaatctaatttaaaatacaaaaaactggtttaaagtgaacatcagtaggtgtgaccccacctttggtgggtgtgatacaaagtgacttcttttattatagccttcaacgtcaataaattacttagttgtgatgtattgcgcatttatgcgcattgttaggtgaaccaccatctgaacacgtagtgttcattatataaagaaaatattcattaaaactatactatgtatatgaccccatataatatttattattttacttataataggtgtttgaaccatttctttttatttgagtatacatattattgacattgtaggtaatggatagtcaacatattatattaatcaacatcggtaaaacctaatattataaaatttgattatacctttataaacaattatttataaataaaaatcatttgttccagtttaaaattatataaatataaaacatcaataataccggctttaaaataaactttataataaaacaaaacctcccgtgatattttctatcataggaggttatttctttatttaaattttagcttattctgttatcatatttataaagactttttaaattattttgtcttcatagcaatagcagccttagccttttcggcgatagttttcgcatcaagaccatacatttcaagaagcggatacggctttcctgaacggccgaatacatcctgagttccaaccctttgcatcggaaccggcgcgttctcaaccaacacctcagccacagcactgcctaatccgccgattacgttatgctcctcagctgtaacaatagccccggtctccgtagcagcctttataataatatccttatctataggtttaattgtagccatattgataaccctagcacttattccttctccggccagtatttctttagcctcagaacatgccggaaccaaaagtcctgttcctatcaaggttacatcggttccgccggataactctactcccttacctatttcaaatttatagctgtcgtcaaatattgtaggcacagcaagtcttccaaatctcaaataaacaggaccatcatagtcaatagcggctttaactgctaaatttgactcaaccgcgtcagccggatttaaaataaccatacccggaatagtacgcatcaagccaatatcttcaagacattgatgtgaagcgccatcctctccaacagaaattcctgcatgtgtggcgccaattttaacgtttaagtgcggatatccaatagagtttcttatctgctcaaaagcacgtccggcagcaaacatagcaaaagaacttgcaaatactattttgccgcaagtagaaataccggcagcagtagccatcatatttccttcagcaattccagtattaataaacctttcaggataagtctttttaaacccgtcagtttttgtggattttgataagtcagcgtccataacaactattctcgggtcggcgccgtattcaaccaaagcgtctccatacgcttgtctcgtagctattttatcaccaatattatatttcattatttgtcacctccaagattctcgatataagcgtcaagctccgaaatagcctgagcatactgttcgtcatttggagctgcgccatgccatgcggcctgaccttccataaatgaaactcctttgcccttaacagattttgccaatacaagagttggcattccttttgtctgcttagcttcttctaccgccgctttgatttgttcaaaatcatgagcgtctatatggataacgtgccaattaaaagcttcaaactttttatcaataggcaaagaattcataaccttagttatatcgccgtcaatctgcaaaccgttataatctaagaacgccgtaaggttatcaagcttgtaatgagcggcaaacatagcggcttcccaaacttcaccttcttctatctcgccgtcgcccatagccgcatagacgcgatacggcttattgtccagctttccggcaagagccataccgcaggcacagctgataccctgacccaaagaaccggttgacatgtccacgccattaacatttttcatatcaggatgaccttggagataactatttatatttctaaacccttttatgtcctctttcgggataaaaccggcctcagcaagaataccatacaaagccggagaacaatgaccttttgacaagacaaatctatcccgctcaggattttttgcgtctttgggatttacattcatttccttaaaatataaatatgtaagaatatcggcaaccgaaagcgaacctcccgggtgaccggcgccagcgctgtgtacggcttctaaagccatttttctgacgtgagccgcatgaattttcaaatctttaagctctgttgaatccattaatatttcccccttgcaaattgtttgttttttcctataaatcagtttaacacaacttcaataaattttcaactattttttataaaaattttgttggtttttcactttttttgcaaatataaaacacattaaattttctatctggaaaacaccatttctgatattaaatcaacagagcgatcgataccaagcaaaccgctgtttacagtcaaatgataattatggcaatcgtcccacgcatagcctgcatattttttatgatatgcgtttctgtttctatctatcgtcttaacagcatgctttgcctcagaatctttagaaaaaccgtattcttcctttgctcgtttgatacggaaatccttgtcagcatggataaacactctataacatccgggttcatccttcaaaagataatccgcgcatcttcctacaataacacatgaaccttttttcgcaatatccctaatgattttactctgagcttcgaacattttctcctcatttgaatagtaattttgcactgcgagaccggcaaacgccatattagctctgggcataggtattccccaaataagaggactggagacatgttcttcaaatttgtctatataaccgctggcaaaaccgctctcttttgcaaccatgtctataagatttctattataatatggtatatccagtcttttagctacctcttcaccaatctgtctgcctccgctgccatactctctgcaaattgtgattataatcttaccgtttttattactattcattttaaagcctcctatgcataattataaacagatttcatttttttgaaataatatatagtcattagaactcctaaaacctctgcaaccggtattgacagccaaacaccgtctattcctatcacagcaggaagaagcaaagctgaaattacaataaacaccagcgttctgaaaaatgacagaatcgcagaaacaattccattattaagagcagtaaacattgctgaagcgaaaccgttaaatcccataagcaggaagcagattgaaaaaattctgaaacctctcacagccatatcataaacgtttgttccgctatgtgtaaatatattcacaagagggccggcaaataacaaactggccgaaaatgttacaattgaagcaactaaaattgttcttaagctaattttatatatcttctttaaacgctcactgtcctgttttccataattatagcttattataggcgatataccaaaagaataacccatatatgcggaagcgagaagaccctgggtataaagtattatcgttatggacgcaactccgtcggaaccagccaaacgcatcaatatattattgagcagaattgtcaccaccgcattcgatagactggtaaccatctcagaagctccgtttgaacagctttttaaaataacctgaatatcaaacttaggttttataatatatattgagccgtttcgcttgaataaaaagtatataaaccctacgaccgatggaacagaataaccaatacctgttgcaagagccgctcctcttatccccattcccaaaactgctataaacaaatagtctagaatgatattaactataccgcctataactgaaaaaatcagtccaaagtgagcttttccggctgtaataaatgacatatgaaatatcataccgaatatagaaactggggtaagtaccaaaataggtatagcataatctctgcaatattcaattatagaatcatctgcgcctagaaaatgaagcaaaggattcaaaaatatatagcatatcaccgcaatcaatgaacttattataaacgctacaactatcaacaatgagaaattttctttagcttctctattctttccctctccaagttttttagctatcagcgcatttccgcctgaaccaaacattgttccgatagccataatcatcaaaactatcggcataacgatgtttactgaagaaagtgcgttggttccgactaatctggaaacaaaaacaccatcaacagaagaatatatactcataaatatcattgaaattatagtaggcaatgaaaatttaataagcattttaaaagatatatttttatctagcgcctgattttgttccatattttctcctttgattaatttatctcgggacaacctcccggaaaagacagtataacagaataatgcggctttgtccagcaaaaaattggataatacggaaccaagcgaaagagccgaaacaatatgtttcggctctttcgcaatgaatggattatatgaaaaactttaattgcattaaagcaattaacaatatcaagctccgtactccgtcggagcaagcgccagggtaactgtcagattaccgtttctgcatctaacagcatcaataaagtctttctcattaacgtctttcttcattttaatactatacataacttcatacagcgaacctaaatcagttgtcctgactctgctcataacactggcggtcgtatattctttgaacaaatcatcaagcaaaccctgataatctaaatcctcaggaatagttacctttaatattttctgagcctcaaaactacttgcaaagttaaatttattcagcagaatcataagtacacatagtaaaaccactccaagtgcaccatataaatagaatcctattccagccgcaagccctgccgccgcgcataaaagtatatacgcaatatctttcgggtctcccggtacgcttctatatcttatgagcgacacagttccggctaaactaaacactcttaccaaattgtttcccacaagcaaaattactaatcccataactgccggtataagaaccagcgacattacaaagtttctgtttggaactacctcgtttgtagtaatcatatatgtaactgatataataagaccaaatataatggcggaaaacaaggtagcacaagctgaaataaatgttattgatgttccgtcaataactgtttgattaaaaagatttgttaaagcttccatagattatttcctttcaaaaatttatatcaggcatttgcagttttgtaacccttagaaaaattttgttcaaaatctgcagttataatatttcccgattccctgacggcactgtatttttcttttgcttcaacgtagcttcctgcttttgcggtaatacgcttaagcataggagtataagcgccgactgactttttaaaaccatatccatattttgaaaaactgcaaggtattatattataatttgacaatatatcagtaagccaaacaggcatagttttgcttgtcttaacttccatcagccataaatcagcgctgtcaagcagaggttctccataatcgcctaactccagctcaaggtcatagcgcctggttcttaaatttgtatcaagagatatccttaaatcaggattatctttttcaaaataggcaaccctgtcatatgctacatatgcggcaggaaccagtttgtaacatttcaaaaaatattctatctctttaagaacttgtaaattcatatattccttatagtcaggaacttttccggtttttataaaatcatatgcttcattaagatataatgtagttcgtcttttattaacaagaccgttaaattttttctttatctctaaataaaccttgccgttttcctcgggaactccataacctctcagcctcagtttctctttataaactggcttacttagagaccttcttacaagcaagtcatcacttgtatcataatatatattgctgatagtgtatccctttccaacctcgctgtatggatctaactccatatattttttgagttcttcagaaactctgaaatatgtttttgaattcataaaaaactttttttcaaatctgttaaagacttcaattgccatgtatccacctccaatcacatcaacctgtttaaatttgatgtgattataataatcttattaccttaaatcaaccttaaaaaatcaattattttttaaaactttttcaaaattgaaatattaaaaacttctttcaataatatataatattttaagattaatttaagactgttctgctattattcttttattgataacagacgtacgttatgttattataaaaatataattgtgaatttatttattaaattccaaaacgaagggactaaaatatcatgagaatacttgttgtagaagacgaaatacatttagccgaagcccttgttcagcttttaaaaaagcagaactatactgttgatagtgtgtatgacggtgaagacggacttgactatgcaatgagcaatatatatgatgttgtcgttttagatttaatgctgcccaaaatggatggactaagtataataaagaatatgaggaagaccagaaatgatacaccggtgattatgctgaccgcaaaaggtgaagttatggacaaagttaaagggctggacagcggcgccgacgactatcttgcaaagccctttaacaccgatgaattactggctagaatacgagccttgggaagaagaaagggcgaagttacaactcccacagggttgacttttggtgatattgagcttgacacatcagctttaactttaagctgcgcttccaaagaaataaacttaacccttaaagagtcagaattattagaatatttaataacaaacaaatcaaccgtcctttcaaaagatatgataattgaaaaactttggggatttgactctgaggctgaagccaatcacgtagaagtttatatatcatttcttagaaagaaattaaaatatttagggtcaaaaacttcaatagttacagttagaggcgttgggtactcattgaaagaggaataatattatgtttaaaaaacttagaaataaatttttaacgcttaatatgattatgatttccatattacttgtcagcgcgttctgcgttgtttttatgatgacttacaacaacatcaacactgccgtaaacatacaattggacagaggtatttctaatattcagcccaaaggccaaagattttttaatccatttcaatcagacccaaacatgaacagaaaagaaatttttcctcatattcccaataacgaaggtcctgcgcctgatgagccgagctcgcttaaactggacttagacggcaatataatgcagacgcggtcgccgtatgaatatgatgaggaattctatacaacaataaaagacgacgcaatcaaaagaattaaaagtaatagttctaataacaacacaaaaacttctcatataataaaatatgatgattcctattggaaatacctaatcatatcatcatatgaaacagatacaagcggaaatgaaatagctgtttattatcttagcatctcaaatattaatactcaaatcggaatgctgcaaaaacttattattactttgtctattgtccttttggctgctttaattttagtattcttaatatgcttattttttgcaaacagatcaataaaaccaatagaagacgcctggaacaaacaaaatcaatttattgccgacgcgtcacatgagcttaaaactccactaaccacaattaatactaacattgatcttctcatgacacatggagacagcactattaatgaagaaaaaaagtggctgaattatattaaagacgaatcctcaagaatggcaaagctaaccaatgatctgctttatttagcaaaagttgaccacagttccgaaaataatataataaaatcaaatttttcattttcttctgctgctgaaaatgtcatccttacaaccgaagctgttatatatgagaaaagtttaaatttagttgaggatttggatgatgaaatatatatatcaggcgatgaaagtcaaataaaacagctggtgctgattcttttggataacgcgattaaatatactaatcaaggcggaacaatagaagtgacgttaaaaaaacttgataataaaacagccagatttgtaattaaaaacaccgggaatggaattccgccggaagatatatcaaagatttttgacaggttttatcgttcggacaaatccagagacagaaaaagcggcggctacggactggggctatctattgcaaagtctattgttgtttcacataagggaactataaaactaaaaagcgaaccaaataaatttactgaatttattgtggagattccaatcagtcaacagacataggtaatttatattgtgtaccacaagctgatttcaattgatataatatggaaacagttttaaccaaaagcagcaatacaaccgcccaatttccggcggttgtattgcattgttcaactttaatcaattttctgcgtctgaataagacgatcaagcacttgaaaattatgcagcaagttctccggtttcatgccatcaaatccccaaaaaactgattcatttgtaaggctgcttaatactacatatccttctttagttggaacacctatgcttagtgttgaacggtcataatctagtttaatgctaaatttactataaagatatatctgccactcaaactcaggataaggtgagttgctgccttttatttcaccaaattcaatattttctccccagacttgtaaagctgttttctttattaaatcaatattttctactgcttcccagtctgttaagtaattatttaacataccaaaaacctccttcaaagaataaatttgagtctgtaagatttaacgttgactcaaaaaattcccattcatctcttaaaaatccaccgccaagagcacatgaatcatgtaaaatcttattaatggatttttggatggattttgctttggtaagaaaactattgttacagtcatacaaaaacagttttagtaaagcaaattacaacactcaaaaaatctgagtgctgcgattctttaggcattaccctaaataaaatggcagtcgttcttgcacatcacaagcgtctatggaaagcaatgttactaaattccatatgtccttgatacttttaccataaaaaatattggcatttacaagttgctcaaatgaatcaaaatcataagcttgtgaaccgtcttccactaatccaacccaatatatagatttgttagtttcctcatcaatcatttttcctaaccatgatgattgatattcaacacatccatcaacacaaaactctatttcaatgcaagggtcttgttttttagcaacatcgtatgacatgatacactcaaaatctttaaaactaatttttttcatatacatactctctttctatattatcttgatccatgttcatgcggccattcagggtgagttttcggattgccgtggttggtcatatttacatctcatatttggtcaccgttctctccaaaccatctgcgtgttttaatatttccagcatcatctaaaatatctacacttgagtttggctcaccttttaatcctagattctttgttgcggtgttatgattcttgtaaggtgtaatatcccatacacattctatttatttgacgttacagactcctccacacaacctcatactgagatataatgagcaaacagtttcacccaaatgtacaacacaatacttaatgttgatagttaagttttctttatatttataaatcaaactactgtccacttaaacatatctttaaaatcattaaaacaattttcacaaatccaatgataattgtctattgtacagtactccatttttttatcatcacaaattgtttcattgcaaaattcacaatgctcatgatcccatgattctgaatgtttctggaaatatacatgtttgagttgtttttcaaacaaatagttcctttgattagttaatctccagtcattttggtttatcattattatagttcctttcatctcttttacttcatatgttccatcttcaaaaatcctataccatgatcatttggcgctttttatttataaagtggttttattgggagttttacagtaaagaatgatatgagctgttctcaagtgtcaatgagcatcgcgtaattgtatttaaataaagtttctattgaaaacaaattcgttgctatttttatagaaatatatcatcctatatagaacaattatgtttagaatttatcgtccctaaaaagcttctctacctcacccattactcttttacacacatgaatattagttacactattataattttgttcaatgaatttaagtaaataaaaaatattttccattttttgtttataattaacttgtttatttttgtccattattcgtgaaatccatcctacactaaaggactcgttttcctttataaactttactgatatatcacttgcctcttcataatgttcataaaaaatggaaaatttgacttttccattagaatatattaaacaataactatcttcatcaattataataaaacctttttttaatagaaattcagtattttttaatataagtttttttcataatcattaattaccggcatcattatttcctctattattatctatttttatcatcttatttagtttattatcaaccaaattgtcaagtatttgatatctttgaattaatgagtatcaaatcaaatatttatttactgattattaaattttgcagttctaatcctctgttcttctaattctgtttctttaataagaccttgggctacttctgaccccaattgaatatactcggatttagaattacaaaatattatctcttctaaacgattgacagcgttgtgtaaaatattataatattgttttgaacaaacatcaggataaggtaatgtttcaattctgctttggaaatcttggattgtaatcatcccttgtgaaaacgcttgacaaagttcaataagttttttaaaagaattcatttatttcacctttattttaaaaataacgcaacagacacccctatataaaatgaggttgtttgtcttgcgtcttattacttattcatagcttaatctcactttagcttcttccagtaaacccaaaaaccaatccacaggaacttccaagttagagtctttcgcataccattggagaattaactggccatcaaatttccgaatgattgccacatctttttcattgtagagtatctctacgattaagttgtaatcatcgtatggatcgtttccaaaatcagcactccaaacacctttttctttcatttctattcaatcctttagtttttattttgtatacttttccaagaaacctataaatgtttttccatcagcagaccatcgtactccagttccatcaggtaatcgaacatcaagtacatctccaaatactgcctcgtgattatgtgtttgtcatcctaaaataattacactatttgttccttcaatcccggaatggatttactttcaaaatattatcatactctaattcagccatttctgcatattctttacttatggcattaaaatactgtaactctttagaaaacattatacgccgaaaatcttgacctaaaatccgattttttgcttcataaatagcggccgcatcagaaattgctcccttgatagcccaataagttatttcagacaaactttttgtgatgtcatcatgatatagaatatctctttctaaaactctataatgatatccatcttcatccgcaaaacaaaattcaccttgaatatcattaggtgtatttttgcgaaaaaaagtgtttagaggcattgatataccatcttcattcatcactggtactgctcttgtatataaagataaaacatggttttccaatgtttttgtatcaaatatttcactcatacttttatttcctcataactctattttttaattattttgatataaccatatctacgtaattctcgaattgacataggcaattgatattgtgttccaccacccggttgatcaaaccatggagcacttgtgcccgaatttacatcaaacgttccgtgaaacggagtgttcaaaccgtcgaagaacccacaaatgtgtaaggcaaaaaacagtttttcgacagtcatacacccgtccataatggacgaatgtatgaatttgcttttctaaatgctctttacgattttttctgcaacttcttcacattcacttattggttttgtaaaagtatttaacccaaagctattcaaaaatacctgataaataacatgagctaattcttttgtacccattccatttttatactcgttacaaatttcttgactttcgtctaaatactcatcttttggggcaaaaggaaatagacctatcggatcccattcatcaattataacatttatttcttctaccattatattttcctcctattctccaaataattgctcgacagtgtttaccatatttgcatcaaagtcagcttttgaatatgcagtaacaagttcgccggcattattaagcacaacagcgccttatccagtaatgtaaatatgattccgctgctttgtttcaaaaccttcccgttagcaacccaatcatcaaccatactttgtgtttttaatgtgtattattatacatttccacctctcaattttgttgagttatgtgaatagacttgtgcatttatttcaggtattatgttatctttaaggaagtaaaaagctacgcaaagcatattacatgaattttactatggcaatcttgattatgactaaaatcgtttgtacgcggcaccgaatacagcaaaaccctacccacactatgtgacgacaagaaaacttcccggttgtctaaattcagaataaaaagatttgtttgaaaatttctcaaaagcacaaggcgacttgcgctgaatctccattgctgatggttttgtatacaaattctgcttggatatgtggattgcagttgatataattggtaaacagttttaaccatgaggacaacacaacacctatatatttgtacgttgtgttgtggttaaataaactaaattgttaaagatatatcatccctgaatacaggtttaatccataaagctttaatttcaccctgactgtttaatgttgcaatagcattttcaatgaaattaacattaatagttcctttaaaatcaggatctccaacgcaaaaccaaccagagctagggtcaaagaacatttcccattcatcgtccctattatcaagcctcttagttccccaatcaaatacatctaatagacgtaatgcacatttatgagtaactttaggtatattcaattttatagctttccaagattgatatggtgcaagtccaaatatttgattagcacacatattatttacatagttagtatcatcagaatcacctgagagaaaaccagtttgaatgtatgtgcacagcagcgttatttcagaattcttctcaggataagtatccattccattttcacttgaattataaaacacatagccatcagccattggtttatttgtatcagcacaaagtctaatcattttatacatcctcctttttagtttgcaataaagttaaagtgcacaattgtattactgtttagatcgacaaccaattcccatgtaccgtttgcatctctaaaactgcctggtacatcccaacgtaatccattagacaaatgtgcgtcttttataggtgtaccgccttgcattatttcatcaactaaggtatttgtaccattagtatctatataatcttactagttctatcttgtgtaccatgatatacacaattatcaatatgttatataagtgatgaagaaatcgtttaactgaaagacagctttcgtgattatgtgtttgtcatcctaaaataattacactatttgttccttcaatcccggaatggatttactttcaaaatattatcatactctaattcagccatttctgcatattctttacttatggcatttaaatactgcagagctttagaaaaaatcattcttcttgaatcttgtttctcaatcctatgtttacactcataattcactgccatttcaagaatttgtgactcaagtacacaatatacaatttctaaaagacttttagtcactttttcttcactaacaactcctctttcaacataacaaaaatggtatccatcatttgctgaaaaacagtaacgtccatcaataaaaaatttagatgaaaaaattgtctgaattgattcatatactccatcactttttgtaatagctacaactttatcataaagtccacaaatgtgagcctctaattgtttagtagaataaaaattttcataactcattataaatctttcaaccttctaatataatcattttttatcaaatcttcaattgaaataagtaattgatactgtttagcgtgctatccccaatccaaattgttataaacaaccgcctggtaaacaggcgattttccttattacacttaattagcaatgttgttccagatcctctagcaaaattgggaatgctgctttaggtcgaccattaccatcatcaaactctactttatatgcctcgttgggtttggtaaaagcaatgataactactccaatatcaccttttttaatcccgtgttccggaaaatcttttaaagttcttacacatgttaattcattaaatttcatagttttctctttaccttacaaaaatagttgtcattcttggaatatctgagcaaggctcaagtatccggccagtctgcacgatagcagtattcccattgaccccagttataggaatatctaccataaatctttgtccatacttatccaatgtctccattattgcttgactatttggtagtttattttaaacttgctccattaattgcccggcgttaaaagtttgttactgtcaaaatttttacgctttgtctctcaaacggagatatctgttacaaaattataagaaaccacacccaattagacggttatattacttaatctactcatcttgaaacggaaatttttccaatatactattaatttcaacacgatcccgctgttcatattctggactgacagcattaaaatactgtaactctttagaaaacattatacgccgaaaatcttgacctaaaatccgattttttgcttcataaatagcggccgcatcagaaattgcccccttgatagcccaataagttatttcagacaaacttattgtgatatcatcatgatatagaatatctctttctaaaactctataatgatatccatcttcatccgcaaaacaaaattcaccttgaatatcattaggtgtatttttgcgaaaaaaagtgtttagaggcattgatataccatcatcattcatcactggtactgctcttgtatataaagataaaacatggttttccaatgtttttgtatcaaatatttcactcatacttttatctcctcataactctattttttaataatttttatataaccatatctacgtaattcccgaattgacataggtaattgatattgtattccaccacccggttgatcaaaccatggagcacttgtgcccgaatttacatcaaacggttttaatacctcatatgtataaaaggcgctattttctgaacctggtggcagcgaacgtgcgctatatggtgtatctattggcgccacaaatttacctgaatcacttccatatctatcaatcattgtaccaggctgtaaagtggtttgtgaaggagttccaacaaaaccatcgttatcaggccaccatgttgaaccatcagggtttttccaattaacagatttagctgcataataatttgtcccaactccctcaggctgagggacgtaaggttccggaacaaatgcgatttgaggttctacaaccgctatgtcgcccatcattgaacttgcgtatggcaaactcataaatgcgttgagtgacccttctataccttttattaagctgtcgtcaaactcagcacctgttcttgcaaacatcgcatttaagtaatgatacagaggtatgtttccgaataattcgtcaatggtgtcttctactgtatcatttgtgttcgggttattttcttcctcgtaataatcaattaacttgttgttcatttgttctgccaaagtgtaccttgaactcggcggcggcagtgtttcctccgctttgtgcatttcttctataaaatgcgatacggcagattttcttgctttgtctcccaactcatcatagttcgaaaacattgcaaaagcgagggctgctcccttttcaacataatcattttctacctgcatagaatacggcgctgacgacagtgtcagcattttttcgaaaatttcagaaatatcaaacaagtcattctgtgattcaaaagaaaaatcagcgtatttttcaagcatagcgaaaattgctgataaatcaatgattaagcttccgccagcagctataatttccgcacaccgccagccgtatttggcgttcgggtccttgattggacgaccgcaccgatcacatcggttctgactcaatttatcatctcctttataatatcatatttttttaaaatattcaattcataccaataagtctgaattgatatttctatgatataccaaaggaagtgacacagcgtgaccttatttgcacattttgcaaaatgtgcaaagataaaaacggttcttatatactgtagaattctataatcactaaatccgtttacaaaattttaaataagtaaaaactcctaaaaataaaataccccggcttgtacaaacggtacaaaccggggcaatatataaaacgttatatcttttacataaatatataaactcaattaaatttcagctatatttttaatgcaaagcaccctgttctactacgacaatattaacctaaacgagcaaacctttcactcgcagcaccgaatacgatagaatcctacgcacgttatgtgacgatgagaaaaaacttctcgcttgcttaaatgcagaggaaaaaatttgtttgagaatttctcaaaagcacaaagtgacttgcgctgaatctccatagcggatggtattgttaacgggttatgcttgggtatgagaattgctgtcgaggtaatgcaaaaacagatttaacattacttaagcaagaagtcctgcaatgcaggacttcttgagattgcatattcaatccactacataaacattgaatggttttgctttacctccaacttgatattgctctacttggctttgccaccacggcaaaacatttttttcaaaagattctatgatgatttctttttttcgcaaatctcctgacataaagatatcaaaattgttgataatgagtgcatagccgtttgcgtttaaccaacttaaatcagttatccaatcaagatatccatcgatactcagtccatttacatgcatttctataatgttggcagggaatttaaaaacacgttcaatttcatctgcataatcttgccatgttgagatgttgtcaccatcaatctctgcaatccatgtattgcttttactattaagctgttgtttaattgaatttagttcatcttttgtaatttgatatattctattttccacattaaaacctcctctactttatttttataaatggtggcaatcccgttggacttacactctgaccataatgactatcagtatagtatattgacccatcactgccagtaacaaatcgcgatgcatctctaccaattccagaggtgggtgggttaacgtcgaattctttataggttatcgaattacctctgctatccatggttggcaatttaaaatcataattatcatatacttttcctgctcttgtacccgatgcttgccccgaataattcccttataatcattttctgcctgcataaaatacggcgctgacgacagtgtcagcatcttctcgaatatctcagaaatatcaaacaagtcattctgtgattcaaaagaaaaatcagcgtatttttcaagcatagcgaaaattgctgataaatcaatgattaagcttccgccagcagctataatttccgcacaccgccagccgtattttgcgttcgggtccttgattgttcgagtgcaccgatcacatcggttttgactcaacttattatttccattataatatcatactctttttaaatattcaattcataccaataagtctgaattgacatttctatgatataccaaaggaagtgacacagcgtgacattattgtacattctgcaaaaagcgcagagataaaaacggtttttatatactgtagaattctataatcactaaatttgtttgcaaaatttaaataagtaaaaactcctaaaaataaaacaccccggcttgcacaaaaagtacaaaccggggcaatatataaaacgctatatctttaacataaatatataaactcaattaaacttcagctatatttttaatgtacaaaattgatattacactatacgtttggaattaacatattcacgccaatccaaatcaccattctcaattcccatgattaaaagctcagccgtagcaatatttgtagcaagcggcacattatgaacatcacacaaacgatacagtgaatcaatatttggttcatatttctgctgcgtcaacgggtcgcggaaaaacagcacggcgtcaatttcattatacgcaatacgcgcgccaatctgctggtctcctccgtcaatccccggaagaaaacactttaccggcaatcctgtagcgtccgcaacaacagcaccggtagtcccagtagcacaaatattatgcttctttaaaatagcactgtatgaaatacaaaaatcaaccattaaatccttcttcttatcatgagcaataagtgctatgttcatttcctatgcctcctatataaatttctaaacaatctttatctgcgtcatatactaaaatttgcaatatcttatacggcacactgcatctgtcttataaatattgattcaccacaaccaataaaaatgcaataccaacaaaaatatagtaccgataaaaaatcattacaaaaatacaaacagggcaattatctatacaaattcaaaaaaataactttcatcttttcaaatccctgcatttaaaactataccacaacattcacaaaaagtaaagtagttttttcataaaattattaattttattgaattattttcatataggcgtcaaatatgtcttttccaacctgcgccgcaaatgaactgctggcgccatgctctattaccacggcaaccactatctgaggatcgtcgtatggagcaaaacctgtaaacaagacattatcttttccgtcagacacctcagccgttccggttttacctccgacttttaactcgctgttaccaaacacttttgcggcagttccatctgcgacaacctgtctcataccttcttttaccgcttcaaatgttgaatcgcttatcggattatctgaaattacttccggctctttttgcattatgacttcaccggtatcataatccgcaacctctttaattaaatgcagtctataacgttttcctttatttaacactgtgcttatataacttgagatttgtgccggagtgaaaagattatcagactggccaatcgctgtctgaagaacatcaccgggatgccattctcctcctgcagcttctctttcctcagggcttgcaaccgtgccgctgctctcagccagctcgattcctgtcgtctttccaaggccaaatttatcacagtattcatcaagcgcttctatgcccattcttcgcccgatatcgtaaaagaaatagttacatgacacgcctatagcctccgaaacatttattgtgccatgtgtaactccctgagacgaatatgcaagacatgtcggctgataatctgaataataggtgtactttcccctgtcggttatataagtgtcagggtctattaaaccggtttccaaaccggcaacagacgtcaagattttaaatgtagaacccggagcgtaagttccattcaaagcgcggttaaaaagcggattagactttttattaaccagctcctcatattcttcattaaatttttcagggtcatagtcaggatacgaagctatagccaacacctctcctgtgtttggatccacagctatcgctgcacctgccccattatctccgaccgcttcatttatccgttttttcaacgatttttccgccgcctcctgaagctcggcgtcaatcgttagctctgcataatttccggctttggcaggtttaacatctaccacgtctccatatctgccgtcagatgtcattctaacctttttataaccgtcagtgcctttgagatatggttccaaaacagcttccaatccgtcttttccaattatgtcgttcatgccgtaaccgctgtcttttaacttttcatactcctccgcatatattatacctgttctgcctaaaatatgagccgccatatttccttttgcataatttctgatagtatcggctattatatcggcaaaaccggttggataatacgtctctttgattttctgaataactatattgcttacatctgttgccaaaacaaacggattgctgccgctgaattttctttgctccatttcatatctgacagccataatatccagcttttcagtttcattgaaatcatcagaaatctcatatttttccgcatagtattttactatttctcttaaagtgttaaatgtatcgactttattttggctttcccactcagcaatattttttgccgtatcctcttggattttcttttctctatcctttttttcttcatctgattctttatttttgttaccatcagctgaggaaactgctgaatcggatttttcaaagttatattcaggtatctcctcttcctcgttatattctatcgggaaagttgaggtatactcatctccattttcgtgaagcagttttactatatcgtttatatttttatttaactcttctgcagtaatatcagttttaaatatctgaatgctgtatccgctcctattttcaacaaccggaacaccattcctgtcaaaaatttctccgcgcggcgcttttgtagcgtatgttcgtattgtgcggttatcagcctgtatcctatactcttcgccattcactatttgcagattaaagagctttattatacagctaatcgctaaaacagcgacaatggcgccgataattatagtccgccttgtaatatcgtttattttcatctattatcaccaaaattttatcaatacttttttatcttaaaccaaacaagtgtcttttctataaaccacagcataggcaaaaccaaaacagcattcaaaactgtttctataaatataatcctcacagcagaaatccacacaaaggaaccttcgcaaaacatagaatatggtattagataaattatttctgcagctattgtggctactgccgccattgcagaaaaaacataaatgttaggacgaccataaaatctgtcgcttacaacagcagaaaaatagcctataaacaaataaataagcatatcggttcctataaatctcccaacatatatatcataaaccaacccaaataatattccgcagagcatcccctgcattcttccgcaaaaaaatcctattaagacaataaataatagaaaaacatttccgtttaccccaaacacagacaaagcatttataagcgcgggctggaggattgcaattaatattaaccaaacaacatgatgtaacagtttcatatatatctccctacctgcttattaatcttcattttcttcatccaagtcttcaaaatcacctgacttttttgactttgaggaattattatttttacttgaacctcctgaatcttcatcttcttcatcaggctcaggatttggacttgcagacgctctgtcgtcaatttctttttgttcctgttccgctctctcccttgcggctttcatattagcattttcttcatcagcaacaacatccatattgtttgttacaacaaatacctgtctgatatcacgaaaatcaacgcaagcatttacaaccgcatatctggtcatcgtaaccgtatcgtccttaatttccgcgacttttcctaatctgaatcctgccggaaaaactccgccgaggcctgttgtggttacgtaatcatcaatttcaatatctgtgtcgcgcgacaaatatgacagcttaaactgtctgttatatctaagctcgctgtcaccttcaacaacccccaaatctttagagcgttccaccattgctccggcagaaaacccagggtcaattattgtttcaacatccgcccaattcgtaccaactttagaaatctttcctatcaaaaaaccatcggaagatataacggtttgctccacttccaatccactattttttcctttatctattgtaaacccggaaaaccagtttgaaggctcgtcagctgtcacatttgcggcggccaaatctaaatcgggattattctgtcttagttcgagcattcgcttaagcctgtcattttcttctgccatttcagcattttcattattctgtttttcaagttcagtattcttttttgacagttcatccgtcttatttctcagttcttttaactcacctaaacaatgagtcacatcatataaaccactcccaatatttccaaaaaacttttgaacaggggacgtggttgtttttattgcatcttcaacagcagtagaattaccgctgttgaaacctaaaaatataagtaaagccactaccaaaagcgtacatcctgataggatgagcgccattttatgtttattaaaaaatttcaaattctgcaccacctgagttaataattctttcttctggtcgcctgcgtcagcatatttctaaatccgccttttcctgccatagctgttcccgccccttttgcgacacagcacacagggtcttcagcttgataaacatttatgccagtagcgttttttataagctttcctaaaccgcgcatattactgcttccgcctgtcagcactattccggtttctattaaatcagaagccagttcgggaggagtttcttccaggacgcagcgcacagcttccaatataaagtttatatcatcgcgcattgcagagtttatctcgttcgcactaatcgcaacgcctttaggcactccgctatacatatccttgccttttagctcaacaacatcagtagtgagcccaaccattgcagcccccagctttatttttgccttttcggctgtagactttgcaatttcaacgttatattttttctttattaattgaataatatcattatcaagagcgtcacctgctgaccgtactgatttggaaacaactacgccgcccaatgatacaacagcaacttctgtcgttccggcgcccacatctactataacataccccttaggctcgtttatatcgactcctgcacctattgcgcctgcaagcggtgattcaataagatatacctcttttgcaccggctgatattacgacctcttctatagctctcttttccacgtctccaatacctgacggaacacttaccgccgcccttatttttgaaaatacattgtttaaattcttgtccagaaactttttaagcaggccaaccgcaacatcaaagtttgttattcctccgtctttaacgggatttaaaacagacaaactgtcggccgtttttccaagcatatctaaagcttcggttcctacggcaattacttcacggctctcacctctggtaaccgcaacggtaggttcgtcaactataattttttcttcattcgcattatatatttgtgtgctgcttgttccaaaatctatacctaaatcaatcgccatacatatccctcctgaaagctatataaaatcaggcatttatatcaaatttataccaaactcttctgaaagtatttctcctaatctgcaaagaggcagaccaacaacattaaaataatctccgtttatagactcaacaaacaatccgcctattttttgaataccatatgctccggctttatccattggttcaccggatcttatatagttttctatctctttttcgctcaagtttctgaattttacgcctgttgaaacaaaatcacttacctctttcccgctctgagtttcaattacagcaagaccggtatacacagtatttattctgcccgaaagagtcaaaagcatgtccttagcttctatttcatcgtttggtttgcccaatatctttccatcaattgaaacgactgtgtccgctccgataactatagtgttttcaccggattcaattcctgcggctatattttttgccttttgcatcgccagccgctttacggtgtcgtatggtttttcgccttcgatcattatttcctcagattcatcggcaattatttcaaaatcaagtgaaatgttttctaaaatctctcttcttctcggagaagcggatgctaatataaatctcatattcaacctcttaaaactaaattattatatttaatgtgaacctaaaatattcctttataaaagtgcattcttgtaaactcttccggtctataattttcaccgcaaagataggctttgcaaattcttttaatttcattcggtgattccacagtaaagtttaaattatacattttaatattataacatttcagctcttccatcttgtctgccataaatgtagggcagctgttcagcagcacacttctgcaatttttcccatcttttataaccggaaacttttttcccaatctgtcagtaatacagccaatactattacacttacaagagttgctgtccaaatttttaagaatacaattctcagtcagcattaacggctgataaccatagacgcatacttctgtcggtatatctacgccctttgctatatcccttatctgagggatactgagttcaggtgacagcataaccgagctaaaccccattataacagaacacaattttactgaattactgtttgtaatattcattctgtaagatccaaaaattttaaaaccatcaaaaattctgcggtattcagatatattgtgtactctgatcttattaaatcccaagttaaacagcctcattataaaatcaatatatttttcatactcagaatcatgtattattgaaggaggctctataactatcctgtctttatcagagataaaccgtttataatcttcctctaataagcgaaccggcacatatataaatctaaaaattttccctgtcgattcttcaaactccttaacagcagtgaactgttcatatgaaaatattgaagctgtcataccgctcaaactgctgtcgcatccagcagaatgatttaaagatatagattcatttctattttgtatatcaatgctgtcagacaatatttcatcttcaatcattttcagcgcttcgcggcggatgtagtttaaatctttaatttgaacatacgctctgccggtgacttcaaccgatattgaatcaaatatgaagacgctgcctccagtctttgaaatctgctgaataaccctttccttctcagttggatttgaagacgccgcttcaacagtattattcgacctcaccgtaattgtcttatttttatataatacaataagtttaatcttttcacctacagcaatatttactttggctgtcagatgaattttaaatttatcttccctatccttgatttcatctaaaatttttgtttctaaactgctcgtttcttttttataaggattgtccggtttattaaaagcaaacattgctctgccttttttattatcaaaatatccggaactcagacctcctctaaaaaatatcctgtttaaatcgtttatctctgatttagatggctgcctgccttcttccagacactttttataaatcttcgttacgcatccaacataagtcggacctttcattcttccttcaatttttaaagaagtaactccggattcttttatatcgtccaatcgttcaatcagagccatatcttttagacttaaaaaatatttttctttattctcacccgacttatataactgtctgcacggctgggcgcatcgtcccctattcccactcctgcccccaagagcgctgctcataaggcactgcccggaatacgacatacacatagcgccgtgaataaacatctctgtctctataccgcaattttccgatacatattttatctctttaaaagaaagttccctggatagaaccacacggtcaaaacctaattccttagccgccaaagcaccgcttaaattatgaacagtaagctgagtgctggcgtgaaactgcatacaaagacctaggttttttgcaagacttaatactcctaaatcctgaattattaaagcgtcaacatgcaaggaatttaaaaactttaaatattcttcaagttcagcaaattctttatcacctataagagtatttacagtgatatgtaccttaactccccgaagatgtgcatatcttacagcattttcaagctggccattgtcaaagttatcggcgtaacttctggctccgaaatttttacccgacaaatatactgcatcagcccccatattaactgccgccgcaagagattcaaaacttccggccggagacaaaagttcaggtaaaatatttttttcttttttcatactgctggctgctgaagcactgttaccagtaagagacataaaatcctccagataaaatattaaatacaaaagtaaatcgtcagtctttctttataccatcaccgcgtcctattacgttaccataaggatatccggtttttttagtccgctcatcttccacagttcttttggctaagttttctgccgctcctgcgcttctaattccaggctgaacagatgtgcttctcggctgtcttgagacactgctttgggttacagaaccggctcccctagtcatcgaatgagatgaacgcagattttctaactctgtttcacgtttagcaagctcaatttccaacttatgcatatcttctttaaggttttctacttcaagttttttctcgtcaagctcggctttttctgacctggattccaccatatactcgcctatttcagtacgcagtttgcttgccgaatcttcacttttcaaaagctcgtcagctagattcatagcggccataacggcaagcattgcagtgcttaaatggctgttctgagacttaacctcagatattttcttattcaccaacagcgcaacgcgctggacatactcctcggactcattgctgacgatggtatattccatattattaatttttacttccatctttgtgttatcttccatagtacaacctctttcatctctcagagtaaattatttccctaaaacttcaagcgctttaaatactccaaacacagtttttgcatcgttaatttcattatccataatcatttttttaacatcgtctataggaataaattcaacatcgagatattcgtcagggtcaagatgattttctcccttagtcaaacctgtagcaagatacaaatgtgtaacctcgtcagcaaatcccggggatggatacataaatccaagataatcaaaattttcagcgctgtaaccggtctcttcgctaagctcacgaattccgcatgctctatggtcctcattattatccagcttccctgcaggcacctcatatattgccttttctacaggttttctaaactgtttaaccagtataatctcatcttcatctgtcacagcaacgattccaactccgcccggatgttccactatttcacgaacagcaagatttccgcccggcatttcaacttgttcaaccctgagttttaaaatcttaccgtcaaatatttcttctgttgataccgtcttttcctcgtatatcattaaaacactccttcaaatacaatagtactatattaaaatcactataaatcctaaaaattaattcatacgattactttatctattacctaaaaatcaatataatttttaggcataatccaccataataatctatctttatatttaaccacaatttgtaaaaaaaatcaagtaatttggcgattaacttttatctttcttattatttgtaagtttttaataagtaatcataaaaattataaaatataatatcaaatatattttgtaaatatatattcgagcgttaaagataaaatacaaactataatataaaattaaactaagtatatggtatggtacaaacttatatttgatttggacgccttttataacaaatgttactatccgcaaaccattactcacctaagatttctattataaattgacttcttgatctgacagtttacattttcaaagtcaagtaattataaaaaactttaattattctgatatcatcttctatttcataagagtaaagttcatttgttattttttatttatttattttttattgaaattcttaattattgtaatatagttaaaatgattaagaatcaagttatacgaaatggaatagtatggagaattatgttaaaactaaatataatctgataattattttttcagtatggctatagacggaacaataagaaaacctctggtacgcaatgctgcttctgcttcgtttccgccgaacatcaccgtttgtgtttttacctttgcactaccggcattaattgtttcaacgcctgaattttttaaaaggaaataattataaaaatttttacataacaacataatttatatttagaccgcaggtgatttcaatgaatttaaaagcacaaaataattatgaattactttttaaatcattgtcacaatgtactgatgacattattttcgttgttgattttgaggcggatgaaattatttggtcagaacaaattaaaaacataactgatatatccaacgtaagaaaaatatcgcaggcacaaaattattggctgaaaataatacaccctgacgacataaaaatgtatactgatgaaattaataatatctataacggaaaaagtaataatcttagatgtgattttagaataaaaaatctcaacggtctatacaattggatacagagccgcggatttgtgaaccgaacaggagatggcagaccggaaataatgacaggtgtaattaaaaatctcactgctgattacggttctgacaatattaccggtcttttagatatttttgcttttaaacgggatatatgccaatatatagaattagatatgctaacaggcgcaataatggatttttcaattgccgatattaaaaagatgaatataaaatattcttatagttttgtaaacgggatattttctatttttgcacgcgaacttactcttttatgcccaacaaaaggtaaactataccgcggtcaaggaaatcatatactgttatattatcccggagctgataaaaatgatgttttaactttatttaaaaacataaaaagcacagttcaagaacaaataaaaaatgagcacaaatatgataagcttgagattaatgtatcctgcgctgcagttatagtcaaagatttttcaccgccggaattaagcaatatttataaaggactaaattactgttctgatttggcaaaaaagaacaaaatgtatgacgttccgctgtttttttcacaaaatgattttaaacaggctattgaaaaaattgacttttatgacgagttaatatgttcagtaaaaaatctcgactcattttgcttattttttcagccgataataaaccctaaaacagatacaatccgctctgctgaggctcttttaagatgggaaaatccggcttcatataagtatggtcttgaaaatattataaaagttttagaatccacaggtcttattcttcctctcggaaagtggataatttccacagctttgaaacatcttagagaatggaaaaaatgcaagcctgacatgcacattaatataaatattgcggtgcctcagataggagattatgatttgccgctttttatcgctgatgagataaaaaagaacggtcttaatggctctgatataacctttgaaattaccgaaacatatcagattaaagatataaagtctattcaaaactttgtacatgctatccaccgtttgggcgccgaaattgctctggatgattttggaaccggatactcgtctcttgatatattaaaagctcttcctgcggattggataaaaatagaccaaagtttcgttatgcaggtttcagagaacaaaatagaccgggatattttaaaacacttgtcagacctatgtcactcactcaaaatcaaaatctgtgttgaaggcgttgaaaacgaagagtctttaaatataattgaaaaatatcttcctgatacggttcagggttatcattacagcactcctttgcctgaaacagatttttttgaatcctttattacagataaatcttattgatttttaaaatttaaaattaattataaaattactgttgacaaaattctaaaatatgctataatgggtacgaaattatttgaagagtaagaatgcgtgcgttaagtgttgcttgaacggggagttgccaggcaaacgaaaagtctttgacttgcggttcgtgttctgcatcccgcttcatacagcaaagttttgaatctgtttttcacagtcttctttccttgctatatgagtgaggtgaaaggaggctgttatttttatgcaaatttctaaaaacgaaagttacaaatctctgggcggaatccgcctattcggaaatttaaaagtcttgcttatttccggattgttcattgctttaagcattgtgctgggcaaacaattatcattcactatgggtccgatacgaatcagctttgaaaacctgaccattttaatggcaggaataatgtttggtccgctggttggtatgacggtcggaatatgcgccgatgttatcggctgtattatcgtcggatatgctataaatccattagttacgctcggcgcggcttctataggcttgatttcaggctcaatttatttttatatgtttaaggacaaccctaaattaaggcttattgccgctgtgggtcttgctcatataataggttctatgattataaagtctataggcttatatatctatttcagctatcccatgccgttaatattaatgagaattcctctttatatagtaataggcaccgttgaaggatatataatttatcttcttatgaaaaacaaaaccttcgcaaatcagctggaaagagtgcaaatgagatgaattataatgaatcgctggattacttaaaaagtatatcaaacagaggcagccgccccgggctgtctcgcattcttgaaattctaaaacttttgggcgaaccccaaaaattattaaaaattatacatgtagccggaacaaacggcaaaggttctgtatgcagaatgttagaaagcgttctgacagaagccggatataaaacaggcctgtttacttctccgtgtattgattccgaaaccgagtgttttagaattaataaaaagaatatatctgaatccgatttttctgaaactgtttctcatataaaaactgttgaggaaaatatggatgataagcccactagctttgagtttgaaacggctatggctgtttggtatttttatcaaaaaaaatgtgacgttgtaattttagaggttggtatgggcggaagacttgacgcaaccaatatctcagacacgcctgttctttctgtaataactgacgtcgccctcgaccatatggattacctgggaaatacgatttcagaaatttcttctgaaaaagccggaataataaaaccaggctgtcccacagtattcggcggaaataacccggaagcgcttaatgttatccaaaccgcagctaataaactatccgcctctcttttattgactaaaagagaaaacgctgaaattatctcatcaggtttaaaagggtctgttttcaattataatgaatacacaaacttaaaaataaaattagccggactgtatcaacccggcaatgctgcggtcgctattgattcaatcaaaattttaaacaagtcaggctttaatatttccaaaaattctatatataacggattagcggtcactgaatggccgggtagatttgaaatattctcggacaatccgcctatagtatatgacggttcacacaatcctcagggaatgactgcaactgttaatagtataaaagaatatttctccggcatgaaagtgaatttaatcatgggggttatggaagataaggactataaaaaaatggtaaatattataagtccatatataaatcaagtctataccgttaccccaaataatcaaagagctttaaacggcgcagaattatcagatttgtttaaaaagaacaacgtcaattcggaatatcaaaccgatatatccaaagctgtaagttcagctgtttcattttccaataagtcaaatacaccactgataatattgggaacactatatatgtataacgatattaaaaaatcaattatttcatgtatccaataatgtattgcaacattattggatacatgatgtttctaaaaactatatttcctctttattactaaataattaattttttaaaatttaattgtcttcttattttaccggttatcaaatttgaacctatagctcttcgtcatcctataacaggtgttgttatattatcgagcttctaatatatttgttagcttaaaacatatctctttcttatatcttaattcttatctttgtaggttatcgctttaaatatgcacgaaattaaattcttcatataatgactgtccctgcatattaattattattttctaataaatttataacctgtttttaattcctcaaataaaatatatttagttaatactgcttgccatgaatcataaaaaatttatatcaaaacatacgctatttgctttatactttttgagttaatttttatattttttgactagtaaattttccagcctagcagtatgattatatttaagtataaaatataaggagaaaaatattataatggaaagtgaaaatattcttgcaagcaaaccgataggaaaactgatgctaaaactcgcgattcctacagttttggcgcagttggtaaacttattatataatattgtagaccgtatttttgtcggacacataaatgaaataggctcacttgctcttgcaggattgggtgtaacatttccgataataatatttataggagcgttttcagcgctgtttggcacaggaggcgcaccaagagccgccatagcaatgggatgcaatgataatgagcgtgcggaaaaaattcttggaaactgtactatgatgcttattatttgttctataatcttatccgtcttttttatgattactaaagataaaattctaatcatgttcggcgccagtgaaaacacactgccatatgcgtcttcgtatatcactatttatctcatcgggacaatgtttttacagctgactctagggcttaacgcgtttatcactaaccagggatttactaaaaccagtatgataacaatttgcatcggcgcagttttaaatataattcttgacccgatttttatttttgtttttcatttgggtgtgcaaggtgctgcgcttgcaacaataatatctcagggaatttcttgtatatgggttttaaaatttctgacagggaataagacgcatataaaaatacgcattaaaaatcttcgtctttcaaaacaaattgtatttttggttatttcattagggatttcaccttttgttatgcagtccacagactgctttattcaattagtctttaataacggaatgcttaagtatggcaatgattcatatgtcgcattaatgtcaatattgtttagtgttatgcagttggtatggatgcctatgcagggatttgcccaaggagttcagccgataattagttttaattatggcgctggaaataatgagcgcgttttttcagcattcaaaaaattgtttattttatgtctcgtattttcaatgtcgataattgtaattttggaattattcccacaattttttatcggtatgtttacatcggacgcacaaataattgaaataggtaaaaacgcaattcgtgtctttatgttatcaatgtcattaatgggtatgcagaccgcttgtcagcatactttccttgctctagggcaggcaaaagaatcagtgtttttggctatagaaagaaagctgatattgttgcttccgttagcactaatattaccaaaaataggcgccctgggagtttggggtctgtttctggcggagccgataagtgattttatcgcagtattaacaaccgtatcactattctcggtaaaaagcagaaaattactcacaaggtaagaaatatataaattaaaacattaaaaatatactgtaaaaggagtttattatggaaaagcagataatatataaaaatcctctgtcatgtcccgaagatgtcaaagattttataatggaaggcaaggcagatgtttattttgtaaatcaaaaaatgcgtatgaagaatagactttctgaaaatgaaggacaaaaatcaaattttgtatattggtgcccggaagagtttccgtcagatatagaaatatcgtggaagtttcgtcctattaaagagccggggctctgcataatgtttttatctgcgaaaggaattaacggagaagatttattcgactattcgctttctccccgggacggacaatatgggcaatatacacatggagatataaatacatatcatatatcatattttaggcgcaaatgggacagagagcgctgtttccacacatgtaatttacgtaaaagcaacggatttcatcttgtgtgtcaaggagcagacccgcttccgaactgcgaagacgcaaaagaattttatgaattaaaaattataaaatataaaggcagaattgtgttcttcatagatgagcttaatatattttcctggcaggatgatgggaatgaatatggaaaagttttagacggaggtaaaatcggttttaggcaaatggctcctcttataggtgaatactctgatttaaaagtatattctcttaataaaaaattataagattaaaatattacgaaaaataaatggaatgttattgactagtttttgagactgatacaaatttttgattaaatataataaaagcggctgattttttgtgtacgaccacctactgttagatttcatgtctaactatagaggtcgccgctttttagccgctttcattatatattatattttttaaatcaaatttataaacttatatttatattaaactataccatgagccatcattgcttcagcaactttttggaatccggcaatattagcgcccatcacatagtttccttctttgccatattcctttgaagcgctgtcgcacttttcaaaaataccttccatgatacctttaagtttagcgtcaacttcatcaaatgtccatgaatatctcatgctgttctggctcatttccaaagcagatgtagcaacaccgccggcattagcagccttagcagggccaaagagtattccattgctttggaatacagctatagcttcaggtgttgacggcatatttgcgccttcagcaactgcgaaacagttattagcaacaagagcctttgctgattcttcatcaagctcattctgtgtagcgcatggaagtgcaatatcacatggaacagtccaaattcccttgcagccttcatgatattcagcctcaggatgagtatttaaatactccttaattctctttctctcaacctctttgatttgtttaacacaatcaaggtcaataccgttcttatcatatatatatccgttggaatcagacagagcaactaccttaccgccgagttcagtagctttctttgtagcataaatagcaacatttcctgaacctgagataacaacagtcttgccgtcaaacgacttaccgttagcttttaacattgcctctgtaaagtagcaaagtccaaagcctgttgcttcagtacgagccaatgaaccgccgtaagtaagacccttacctgtcaacactccggtgaattcatttctaagtctcttatactgtccatacataaatccgatttcacgcgcacctactccgatatctccagcaggaacatcagtgtcagctccgatatgcttagaaagctctgtcataaagctctggcaaaatctcattacttcaccatcagatttacccttaggatcaaagtcgcttccgcccttaccgccgccgataggaagacctgtaagagagtttttaaatacctgctcaaatcctaagaacttgatgataccctgatatacggacgggtgaaatctcagtccgcccttataaggacctatagcgctgttaaactgaactctgaaacctctgtttacctgagtttttccattgtcgtctacccaaggcactctgaaataaattactctttcaggctcaacaagtctttcaataagtccagcagcttcatactcaggatgcgcttctacaacaggctccaaagattctaaaacttcctcaactgcctgaagaaactcaggttcgtttgcgtttctcttttgaacctgctcaaaaacattctttaaataaccgtttgaaattgccatgttcataattctccttttcattataatatatataattaattattttttacgctgtgataaatactcgtcaattgacgcagcagcagtttttccggctcccatagctaaaattacagtagccgctcctgtaacaacatcaccgccggcatatactccggttttacttgtctctccggtctcttccttagcaacaatacatccatatcggttagtctcaaggtcaggagtagtattctttataagcggattaggagtttgaccgattgctactactacaacatcagcatccaaatcaaattcactgccttcaaccggtacaggtctgcgccttccggacttgtcaggctctccaagctccatctttatacaagttacactatcaacccagccgttctcgtcgccgtttatcttaaccggattgttaagaagtttaaactctattccctcttctttcgcatgatgaacttcttcaagacgcgcaggcatctcttcttcgcttcttctgtaaactatgtaaacattctctgccccaagtctctttgcagaacgcgccgcgtccatggcaacgtttccgccgcccacaacaacaacattcttaccaacataaacaggcgtgtcatactcagggaatttataagccttcatcaaatttattcttgttaaaaactcgtttgcagaatatactccatttaaagattcaccctctattttcataaagctcggaagccctgccccggttcctataaatactgcgtcgtaaccttcttcattaagaagctcctcaacggaaagcaccttgcctatgaccatattagtcataacttcaacgcctaactcctttaatttattaacttcagcagcaacaatatctttaggaagtctaaattcaggaataccatacaccaatactccgcccggtgtgtgaaaagcttcaaatacagtaaccttatagccaagctttgcaaggtctccggcacatgtcaagcctgacggtcctgcccctacaacagctaccttttttccattgctctcaggcttttcagaaactgatttacaattttccatataccaatctgcaacaaatctttctaaacggcctatagctaccggctcgcccttaatacctctgacgcagaacttttcgcactgattttcctgcggacaaactctgccgcaaaccgccggaagagaactggtttcctggatttttttatatgcgtcttcaaacttgccttctgcaacaagcgcaataaattcaggaattttaaccattacaggacacccctgcatacaaggtttatgcttacagttaagacatctctgagcttcttctacagccatttcctcagtatatcccaaagtaacttctttaaaattcttatttctcacatttggttcctgctcgggcattggcaccttttcaagtgacatattaggcattgttcattccctccaatctacatttatgcgcgcgttctctcgactctgcctcctgatttttaaacattctcgagcgtgcaatagcgctgtcgaaatcaaccaaatgaccatcaaagtcaggtccgtctacacatgcaaatttagtttctccgcccacagttattctgcagcctccgcacataccggttccgtctatcataatcgggttcatgctcactattgtctttatatcatatttgcgagttaggtcacaaaccgctttcatcataacgagcggacctattgcaactactaaatcatatttttcaccggaatttataagttcctcaagttttgctgtaacaaatccttgattcccgtttgatccgtcgtctgtcattgtatataaatttgtacaggcagctttgcacagatcttctattattattaaatccttatttctgaatccattaatcatatctacagaaacgcccatagaatgaagcttttttgcctgcggatacgcaatggcggtacctaaaccgccgccgataacagcaactttttttacaccctcaaaatttgaagcgactcctaaaggccctaccatatcctgaagactgtcaccttcaccgagttcgttcaaactttccgtgctctttcctactatttggaaaataacagtaaccgtccccttgtcacggtcataatcagctattgtgaaaggaatacgctcgcctttctcatccactcttaaaattatgaactgacccggctctgcctttctggctatgtacggtgcctctacttcaatgagtgaaacagatggattaagcacttcttttctaacaattttatacattactacacctccataaatatctgcacatctcagtctatttaatttccaatatagacatttcgttacattatatcataatccgctgcttcatatcaacagaaattttgcataaggattttatactcatacgcctagatttaacaaaaaactataaacttcctctaactgcacaaaaaaagagtgcagctaataaagccacaccccattgtgcgtcatagaacataataaaatttcaaattatcgtatcaaaaatctatatattatatctcaacagcgccattgctgtcaaaatacagaatttacaatttgaataaagatttttattaaaaaatctctcaaataattgtcttactgcaaactatatagaagttcacaaaactttattaagtatataataaccaaattattttgtcaaggactaatttaaaattttttaagatttatattttattttttgaaaatgatgatagtcgtaatatcttccctgccaaatttcacctccccagtcccagccatatgatttaaatatatcataaactttatctcctttatgtatcatagctttttcctcaacctctgaaatatcaggataagttaaacctctgtctgaaaactttagaccgttctcaggcagtaccgttcccgtctcagagatataaggatttatttttggatttatatctatcgcccgtcctaacgaatgattagaaatccgttccgtgccgctcacctttctgcagcagaatgctgatgtgttattatgtctcattgattctaaatccaaatcctccgcttttccattataaaaatagtcaattaactcaattctttcaatcggatattttaaatcatataattttaaaaatatctctagaacctcgtttttaagttcttttgaaacaatcaaatgacctaaacaaattttaaaactgaaatcataatatggaacgcttaaataactcaggtcatcataactgactatcgagttttccggcattgattttccattcataagtttcattatttccttgggaatcatttcatactttccgctttttcgagttatatttacaaaattctggtcacacatattttcaccttatctttataataatttatattaaaatattatgcagtttttgaatttattcttgacagaagctaataatagtcttaaatgacaatcattccgggagggattattatgataagaataaataacagtctcattataaacgctgaatctccaaatgaaattaaaaacgttattatcgatgatttggatatcataacctgcggactttcattaaagtccagtgttacagcctccagcattgatgattccggttttttatattgtatacaaagggggttttcaacatgcggcagtgacgaaataatccttcctcaagaattcaaaattggatgggacaaaaaggcggaaaatatatatccctgtcttgaacttgtaaccctcatgcttgtatcaggaaaaactcctgatgaaatctctgaaaacatatatttttacaattaaaaaacatttatataaaaaccttacttttatactattatattcaaaatttattgactgtttctttctgatatgttaaaatattaccaataatagattttcaaaatattatataatttaagggaggtattagaaatgaaagtattgtctattgttatgggcataatttatttaatcttaggtattttatgttttataactccggtttttacagcaaatgtctttacatatataattgctgcagcaattttgcttgcggggatatggatgattgtttcatatttcgtaagccagggtgaagacagttttataaagaaaagcggatggtcattggcttttggtatattaacagtcatattggctttaatactcatgtttaagcctgatttcgctaatgttgttatggcgtcaattttcggagcatgggttattattgcaggtatagccagaatatttgaggctttcgccttaaaagatattggaagctcctggggttttgttttagcactggggattctaacgcttattcttgggatattcttagtttgtcatccacttataacatttgtagctataggtatatttattgctctttcactgctgtttgaaggtataaacttcattattatgggatgttctttataaatttcatatagtctgacaaaattgaataaatatataataaccatattgatagagcacgtgataacacgtgctctattaatactattgttcttaaacacggagggaagttaaaatcatgaaattcaatttatttggaaatcaggaatataagaaaaatagatttatgcttggtctgtatattattctgatacttattgttataagttctataatttttcaaataaaatatcaaagatacgaaaatgttttcacttgcgtgctcactctaatattatttttgatacctagatttatcgattacagatttaaaatcgacttgcccagaacccttgaggtaattatagtcctttttatttttgcagcggattttttaggggaagtaaacggtttttatcaaaggtttccctggtgggactcaatgcttcacatgtctaacggattcttaatggcaggcgtaggcttctcattgatagatatacttaatcaaagtcaccgcgttcagttccacctatctcctgcatttgttgttatggtcgccttttgcttttctatgactatcggagtactctgggaattttttgaattccttgccgatcaaatccttagaacagatatgcagaaggacgctatagtgaacagtatttcttctataacaatgaatgatatttctatcaacaaatcaatcttggtttcaggaattgacgatgtaattttaaaaggcaatcatctattgatagatggagcgcttgcaaaaaacggaatgattgccatgtcggattatggaattaacggataccttgatattggccttattgatacgatgaaggatatgatgataaactttttaggcgctgtaatattctcaataataggctatttatatctaatcggcagagccaaagggaagtttatagaatgtatagttcctaaatttaccgaactatcaaaaaataactcaaatggaaaatcacttactaatataaagaaaaccggcggttcaattctaaaaataaataaagacagaaaaaatgatgatgaataatttatgcacatattattattgacggtttttctgttttagtgtataatgttctaaatacactaacggaaaggcggtagatttatggataacaatattaatggttttgactatgaaaatattgataaatatattgagcttataagaagccaaaattccagatggaacatgattccttcacattattataccaaatacaatgttaagcgcggtcttagaaatgcggacggaaccggagttcttgccgggcttacatcaatcggcgaagttcacggttatgttattgacgaaggcactaagtctccaatagaaggtaaactcagatacagaggtattgacgttgaagacatagttgcaaactgcagagctgaaaaaagatttggttttgaagaagtggcttttctgcttatgtttggcttcctgccaagccagtctttgcttgaccagtttaaaaggtctctatcaagttacagagttcttccgcctgaattcacagaagatatgattctgaaggctccgagtaaaaacatcatgaataaattggcaagaagcgtgctggctctctattcttatgatgataatccggacgaaatctctatacctaatctgctcaggcaaagtttttcacttatcgctcgtttccctgtgcttattgctaattcatacgcgtcaaaacgccactattttgataatcaaagtctgattctgcacaaccctgtgcctgaatattcaacagctcaaaacttccttcatctcattagggcagataataagttcactgagcttgaggctgagattctagatttggcattaatgctgcaagccgagcacggaggcggaaacaactcagcttttactgtgcatgtgctttcatcaaccggaacggatacatactcggctatttccgctgctgtcggttcactgaaaggaccaaagcacggcggagcaaatgacaaaatgatgtcccaaatgaatgaaattaaagccaatgttaagaattgggaagataaagacgaaatatatgaatacttaaaaaagattctgcgcaaagaagccggagacggaaacggacttatatacggtattggtcatgcggtttacactatttcagacccaagagccataatactaaaagaaagagccggatatttagcagaacaaaccggtcactctgatgaatttgctctttattctgcaattgaagaacttgcaccgatcgcttttagagaaataaagggaattgataaacctatgtgtgcaaatatagatttttattccggtttcgtttatcaaatgcttggtatacctcaagaactgtttacacctatatttgcaatggcaagaatagtaggctggtgcgctcatagaattgaagaagtaaccaccagcaacaaaattattcgccccgcctacaaaagtgcggttaaacgtcttgaatatacgccgatagatgaaaggaaaacacctactaaagccgatatagaaaagaacactattaaagaccaaaccgcgccgtcaatcgattcggaaaccggagactaattttataattgacttttgttgtcttaagcccgtcatacgtaaagtgacgggcttttattttataataatataataattcacaggcgtacattcttatctttatatgctaatcaaaaaattttttaacaaaaatgaacctttttaatttcaaatgtatctaattagtgtaaagcaaaaacaacagcgctgttgaactgctttggaaaggcagaaagtataacatggataattacacatttacgcaaaaggttttagacgatgaacaaaccttatataacatagcaaagtctattctaataatagacaccgactgcgaggatgcggttcaaaacgcaattctaaacgcgtatacaaagctatcctctctaaagaacgaagagtattttaaaacatggctggttcgcatactaatcaacgaatgctataagctaaaaaagcgaaactccaaatttgtcccgtatgaagaacaaataacagctgatattcaaacgctcgacaattcagaggtgagagaattatatcaggctataatggaacttaaacctaaaatacgtgttgcagttgttttattttacatagaaggatattcagtaaatgagattaaggatattttaaaaattcctgccggcactgtaaaaagccgattggcaaaaggccgaaaagctctaaaatcaaatttgtcgtgttttgattaaccatgaaaaggagaaaaataatgaatatagataataataaaattaaaaattcctttccaaaatctacaagcaaattccattcaaaaattcagcttacattagatgagctgcctgaaaaaaaggagatttatattatgaatagaaaaaaaacatttaaaagaggattggcaatctgcgctgccgctgttttgttaataggaaccactgcatttgcagcaggcaagctggtcccgatgatatattcaagttcatcatctatacctgattattactctattccaactgaacaagaactggataaaaagctgggatacagcgctaatattattgaaaactttaacaatggatttgaatttacaggcggaaatatagttgacaacaagagtaaggatgaaaacggtgatattaccgaagagtttaaaagcttcagcgctaaatataaaaatggtgacaaacgaattacgctaagtattgataagtcggataactttgaggttggtgaaggcaaccatactattcttgccgacaaatatcagaatatagatatttactatacaaactatataaataaaatcgtacctcctgattataaacttactgagcaagataagatagacgaagaaaacggcagtttagttttcagttatggttctgatgatattgaaactcaagaacttcaaagcgtctcatgggttcaggaaggaataacttacaacattatgggatttgaaaccggtatgagccaggaagactttgtaaacatggctaaagaagttatagactataagtaatagagatggtaacagaccggagccgtcggatattttaagttactttgattaacacaataacgttaaatcaatatcttaaaaaatatctgacggctccaaattctttattaaatcttaagttatttaaatctatttttccattcttcctttgtcattctgtttacatattctgtttttatttcttttgtaataggccaaaatttatctttttcaacatgatgaaatttaaatccacacttttcctgaacctttttagacttgttattgccttcaaaatacccgcaccaaatagttttaaggtttaagtcctcaaaagcgtgacgaagcaaagcgtcaacagcctcgcctactaatcctctgccccaataaggaaccgctatccaaaatccgagttctccctcatcagaaccaatatccaaataactcttatcccctatcatcaaatctataccgccaaccggtttatcctcatcttttaagataattgcatatgtttcatcatttgataaaacacctcgaatagcattcagactatattcaacactggtatgtgcataccagccggcctcaggaccaactctagggtcttttgcatactcataaaggttttcagcgtcttcatctttccatggacgcaatactagtctttccgtctttagtggcattttcataacctgccttttcatgtttaattttaaaacctattttttagtattttcccattcttctttggttatccttgaaatatgctcagttctggtatcattcatcaaaagccacaccttatcattttcggtatgatgataagtaaaaccacatttttcctgaactctgcgcgatttgtcatttccatcaaaatatccgcaccatattgttttaagattcaaatcttcaaatccacgtcgcagcagttccctgactgcttccggaataagacccataccccaatacgggacccctatccaatatccaatctcgccctcgtcatcctcaatatcaaaattgcttttttcacctatcattaatccaatagatccaaccggctcatttgtctcttttaaaacaaccgcataagtctcaggggctgataaaactccctttataacccccgcactgtcctcaatactggtatgcaccggccaacctgcaataggaccaactttcggatcgctcgcatatttatataaagattcagcgtcttcatctttccatggacgcagtattagtctctccgtctcaatcattgcttatcaccgtcatttctccaattttttataaaacttataaactcttctgccggcaatggttttgaaaatacaaatccctgaatcaaatcacagccgatttcttttaaatattcaacctgttcagtattttcaacgccctcagacacagttttcatatcaagagcctttgccatttctataatacttttccacaactttttatcccgcagactattgttactttcccgaaaaaacaacatatctaactttaaagtatctatcggtatatttttcagaacattcagcgaagactgtccggcgccgaaatcatccagcgaacacgaaaatccggctttatgaagctgagatacagaactaataaaaagcttataatcttcaaacacaaaactttctgtaaactctaattcaatacctccgtcaggaatattatatctttctttcgtcccggtataaaattcaacaaagtcgggctgccacagcccttttcttgatacatttaccgaaattggcccgggcacatcgccgctttccaaacatcttttgtaaaaccgacatgcttcctccagcataaaacggtctatactaacaataaaaccgtttctttcaaacaaagatatgaattccgatggagggattatacctttattggggtctttccaccttacaagagcctcagcacccgcgactttatatgtcctgcaatctattttgggctgtagatacattttaaactcgccgttatcaagagcggtttccatacgggattccatttcaatttctcttaaatgttcttccctcatcttatcattataatataccattcggctttcaccggaattttttatcgcttttaccgcaacatttgctctgttaagcatgtcccttagtgatatattgtcattttgatttatcaaatatatccccatatacatctcaattttaaatttatatttttgaatatccggatatgtacacaaacgctttttagctgtctcaaaaaaaccttttaactcatctttaactttatactttcttatggaaaccaaattgtcaacattgaatcttgcaaatacttctccgtctctaattgttttattaatcccgtctgcccaatattttaacagcttatcgccgacatcataaccgaaaatttcattcacatatttaaaattttttatatccgcatataaaatagcataattttcttcactatttttcctaatagcctcttcggcgtctatcataaacttttgttcatttctataacctgtcagcgaatcaacaaacgccagcttttccaattcccttctgctgcgctctcccattcttctaatgcgtatcagcagaaataaaaacagtaaagcagatcctaaaattatccctactattccaataatcatattagagtagtatctgctgatgtctgctgacggaacaacacaaaacacaaaccaatcattaacacctataggcgtgtatgctgcccagcgcttttctccattgtaataatattcaatatttccggcttgtccatttcttaaatctgattttaacttttcttttgaactatcatcataattataaggagttatgatatcaggtgaattttgatccacagttggacgttttgaccttataacataattcccctgactatctactatatgtgcaaatccatttcccgcataaactgagttattcaatatattatgaagcgattcggcagcacgaacagcgcaaagggcgcttatcaccctgcctccgcgaattatgggaacagcatagaaattcacgtataaattgcctatttcagccttctgagtattagttataactctttctcctgcatagactttctctacaaatcctttgtctgaaatatctatatctttatattgggttccatcaatatccactcccatagttataccatttttatcaacaaatcccatacgtataaaagcattatcatcatttatagttttaagtacaggcaaaatagtatcataattaatctcttcaagtccgccaatcattttagcgacgccgtctaaggtttgaaagtcaccctctatctgcttattaacggttgtcttgctgttttccgcaatttctttaatatatttttggctttctaactcattctgaattttacaatagttcaaaaataatatacataaacctataaatataacacaaaatacggccgcaacaactgtcagccgatctttcataatattattttttttatttttattattgctgtaaaacgatttaaacacaccaacctaccccattaaaaaccgttcttatgaccatctgtttggaagcaaataatcaagagtaacaattttatctttcaacattacttcacagtttatattttcgttatttatttgatatataaattcacggcatcggccgcaaggcggaattatatcatcccatgcgctcacagcaaccatttttataattctgctttcgccggcagtaatcatagccgctattgctgcatgttccgcacaaaaccccatagagcacggagcgtcaatacaaacgcctttataaacatttcctttatccgttaagatagctgccgcaacagaaccagccgatgtataatcggacaattttctttcattcacagtttcagcggctatcttatataattcatcaaagttcataattatctaactccatcatttttataaagccgcagcgctgtataaaaagcaaactgcggcttatcagtttaattaatttctattgtctgagcttcatcatactgttttgaaacactctctggacacttagtaaactggctcacaacaaatatcaccaaacatgaaattataaacgccggaactaactcataaacattaaatataccaccctttaagaagtaccatataatatcaacaatacctcctgtaagcacaccggctatagcagcaggagctgtggtctttctataatagagtgagaataagatacatggtccgaacgcggctccaaatcctccccaagccatagataccaactcgaatactgaactgtttctgtttagagaaataaatattgcaataagtgcaataaccacaacagcatatctgcttattctaaccaatgaatcactgctgggtttcttctttgaaaacagtctgtaaaggtcctctccgaacgttgatgcagtaaccaaaagctgagagtcagccgtactcattatagcggctaaaatagctgtaaggaatactccgctgaggattatcataaagatgtttttagagcccccaaatatggtctgtattaaaaccataaatattttttcactgtcaccgtttaccatttcaacatagttttgggcaaccataccattttcaacatatacttttcctaatacaccaataagaactgcagcgcctaaagttaaaattacccataccattgcaattattctggcaggtcttacttctttagggcttctgatagccataaatctggataaaatatgcggctgaccaaaatatccgagcccccagcctaagcttgagaccaaaagcagtatattaatcgttccgccggcgcttttcggaagccatgaaaacacttcattctttgcggcttccagtcctttaaattctattgctgtcccttcaaatccgcccatctgacaaacgataataatcggaatagctataatcgcaaaaaacataattattccctgaatcaaatctgtccatgcgacagctttaaatccgcctgtgaacgtatatccggtaataattacgccgccgataatcaaaccgacaacataaggcacgcccagcgttgcttcaagcagcttagcccctgcagtgaactgagaagcggtataaatcaaaaagaaaaacataataaaaagcgaagaagcaactctgagtatatgagttttatcttcaaacctgttttcaaaatacaccgggattgtaatagagttattggaaacctcagtctgctttctaaggcgtttagcaacaaacagccagtttaaatatgtacctataagcaatccaatagctgtccaaagtgcttctgttgttcccccaaacaccaaaaatgccgtgccgggcaatcccaagagcagccagccgctcatatcagatgcctgagctgacattgccgcaacccatttgtttaaacctcttccgcccaaaaagtagtcgttaagagtattatttgtattataaaatccaaatccaatcagaagcataaacaaaagatatactgcaaaaacgactacctgaataacaatagttaacacaatttttacctccgcccttataagttttgattataaaaatattaatataaaatatgttgttattttaccataaatttctacataaatcaactagttttttggaaataattttcggttaactactgtatcatattattcaattttttattttactgagtataatgctctaagtgaatttattatacataggaatgcaactcccgtatcagcaaaaacagccagccacatattggaataaatacctgttagtccaagaaacattactataattttaattgctagtgcaaacactacgttttgttttgcaattgcagtggctttctttgaaattgctattgatttagggacagcatccatatttgaattcataaacacaacgtcagcagcttctatggccgcgtctgcgccgcttcccattgccgctccaacatctgcgccggctaaaaccggtgcgtcatttattccatctccgacaaacataacacttccatactcatgtcttatcttttttagttcactgaccttattttcaggcaaaagttttgcactgtaattatcaacgcctgtatattcggcaacctgtttagcagtttcttctgaatcgcccgtcaatatagcagtcacagcgccctgagattttatcttttttatagccggagccgcttcgctctttattgcatccgcaatcaaaatatatccctgcaaaactccgtctatcgctaataatacttctgaacctcctcccgagggattatatttagaaatatcaatactgtttgcttccataagttttctatttcccaaaattaatgacttatcttcgatatcagccttaattcccattcctgaaagttcatgtacattatttggtcttactatatcaagtcctctgcgtttggcttctgcaacgatactttcgcctataggatgagttgaattcaactcgcaggaagcagataatttcaacacttcatcttcattaaggctgccaaccgtatgaatattttgtacttcaaaattcccctctgtcactgttcctgtcttatccataacaacagcttttattttggacagagattccataaccactccgcccttaaacaaaattccaaattttgaaccggcgcctattccgcaaaaataagcaagaggcacgctcagcaccagggcgcacggacagctcataaccaagaagctaagcgcggtatatatccaaggataaaaatcctgattcagtattaaaggcatacaaatcgccgtgaaagccgctatagcaacaacaatcggagtataaattctggcaaaacgcgttataaagttttcaattctaggcttgcttgcagccgcttcctcaacagattttaatatcctggaaaccattgaatccccaagaactttacttactttcacttttaacagcccggatgtattaacgcatcctgacactatttcatcaccgggtttaactttcaccggaacaggttcgccggttacagccgatgtatcaagccggctctcaccctcaaccactattccgtcaagcggaaccctgtcaccgggccgtaccagcaccaaatcgccgggaactgcaccctctgcaggtataatcttcacttctttatctgcaacaagattaacagtctcgggtcttaaatcaaccgcgtccataatttgacttctgcttctgcttacagcaatcttttcaaacagctctccgacacggaaaaacagcattactcctaccgcttcaggatactcgccaatcacaaaagctccaagcgtggcaacagacatcaaaaaattctcatcaaacactttaccctttgtaatatttttcacggctgttaaaagtaccccgccgccaagtattaaatatgatatgataagagtcgaaaccgttacaatattataatcctcaactcctagtatggctttgaatattaacgttcctaaaaacagcactgcaccggcaacaatagaaataatatctttgcggttttcttttatatgtcctctgctttttgtatttccgccgtcttcttttataactacttcgctctcaattttctgagccgtccttataatttcaggaagcagtttatccggattttccgccgtaaccgtaatctgttttaaaggaaacgatatattgaccccgacgactcccggaatgttaccggacatcctctcaattttagcggcacaattagcgcaatccaaattatctatagtatattttttagttattaaatttttataattgttctcagccttatcgccttttaaatctttatctaaagaataatcttcattatggatattacttgtattatcgtcatacatatgatgttcatgtatatgaccgccgccttcctgcactgaacagccgcaatcacactcatataattttttatcttccggcaaatttgcttttttcatattggtcacctcttctatatacatcttattcaacatatgaacaattgttcatatgtttacaatgttataataacaccccttactatatttgtcaatagctttttaaaatatttaaaaaatataatgtcctatattttacaaaaacgggaacaaatagcataataaaacagtcaaatatatatcttgataaaactagagaacaattaaaaaattatattataaaggtgggttatttatgaaaaaactattatgttttgctttatcaatttttatggctttatctattgctgtgattccggtttacgctgaaaatattgacgggctggaatctgctattctaaccgtaaaatcaagggttgagataccacaggagtattcagagtttgaaagtgataccttgatgtctgacagaggcgtcacgagctatgatttaaaatggtcgacactgaaagatgaaaacgatgaaaccaaatatattaacatcactatcgaccaatatggaaatataacaaaatattcaacaagcgaaagaaataactactattataacggagacgccaaactgccaaattatactgaagaacagctgatacaaattggatatgactttttacaaaagctaaaccccgatttgatatctcagttcagtttcgaaagcggcaaaacctcaggtataagtataagttatcctgaaacgactgtaatatttcatcgttacataaacggtttaccattctgcggagatacagcttcgttatataccaacacatcaaccggtgaaatatccagtatgcgtgtttctttaacatattgtgacgaagttccaatgcctgataatttaatttcagaatcagacgctatcggacattttaacaatctgtctccaatgacggctaaatatatcagcagcggtgaaaataaagcaatccttgtttatgagcccaaaaatcaatatttagaaattgacgcaaaaaacggcggggaatataaagaatacactgactcaaatagcaaagtaatgtccggaggtagcggaggcggttcaaatatggctgctgaaagcgccagtgacagcggcttgacagagaaggagcttgaggggattaaacagatgaataatctaatgtcaaccgaacagcttcgcggtattgcagagggaatgacagagcttaatcttgaaagtgataattatgcgtcatgcagttatagaagagtatacaaatcttatgaagagtctgaatttgattattatgccgacttaacatatattaaatatgacgagaataacaaacaaagcaggaagcgcatatcttttaatgccgctaccggtgaatttttaaattattattctgattccagcaattatggtgataaagttccaaaatatactgaggctcaggctcttgatattgccaaaagcttcgcagataagtattctaacaaagagtatatcaataccgacagcgaccttgaagcttcagataagattgacgaatcattggattattataacaactattattttacatttgaaagaaaggttaacggatttaattactcacctgaatatattagtgtaaaagtcgataagctgacaaacgaaataatttcttttaataaacaatggagtgacaaaactgagtttgaatcaactgaaaatatgatttctgctgaagaggccgcagaagctttaatgaatactgttggcattgaactctgttatgtttcgaatctgtcagcaggcaaaacttgcacagctgatttagtttataaacttaaaggttcaggcaattattatatttcagctaaaacaggcaaacgtgtaaattataatggagacgagtacaaagaaacacaaaaccccaatactgctgatgatataagcggccactatgctgaaaaacaaatcacagctttgcttgcatataatgcaattattcttcctgaaggtgaaacctctttcagacccgatgaagcaatcactcaaggtgaaatgattacttttgcttcaatccttaaaggtcaaagattcccaagacctttaaattatgaaacaatttatcgttttgcaaagaataacaatattgtagactataaagatattgctgacgcagaaacaatatgcacaagagagaatggaacaatgttcataatcagagcactcggataccaaaacattgctgaactgcccgacatttttgactgcaaatttgcagataaagatttaatatctccgggaatggaaggatatgtagcgcttagcagaggatttggtttgataggaggaaaccctgataatacatttaatcctcaaggagagcttacccgcgcagacgctgcaataatgatatataatttcatgacaaaataaaaaacaagttaagatacaaaaagacggtcagctgcttttacagcagctgaccgtcttttattttatgttcaacatgggataaagtcttgttgattatatcaaccacatggtcgtcatctatagaataataaatacttttgccctcacgtctcgtcttaacttgtccgcccaatttcaattgcttaagctgatgtgatatagctgactgcgacatatcaagcatagcggaaatatccgatacacacatttcgttttgagacagcgcatacaaaattttaacacgtgtttcgtctcccaaaactttaaaaaatgatgatatatttgaaatcagtttatcgtttaataacttttgtgattgtgccgtctgcttctcatcaagttttctttctgtttcaaactcatcctccataagtacatctccctaaatatattattgttcaggaacaaccgcaaaaaacaccaagtcacttttactgtcgttaatcaagctatgactgtgacctttgggacaataatgacataatccctcagatacactctcatattcaccgtcatataaaacttttcctgtgccatttaaaatatatatgatttcactgcttgtatcatgggtatgtaatccaatagacgctccgggttctaaacatccgcacataattttattgtttttgtcaacaaacatatgtgaaacaatactcttttctccgcccttaaaattaggaataacagtttcttctatttcattaaaattaataatcattatatcatccccaaacactgatttctaacccgaaaaatttgaaaacgcttcataaattgtcacagcattattatgagaagctcgtttcttaaaatccccggattctctttcatacaaagatttaaccagcaaatataaatcaccgctgtaacctatcttctccataataacaggattggtatttaaatccagctcataatcaaagcagtctgcattattgccgctcatcaaataatccctatatggtttgtcaacaataaaaatcatattatcgccggaatcaagctcgctcataagtctggtttgaaccgcaacaaactcgtcgctctcctcttccctgctggcaatcataggcgtcaaagatattgtcacaactccgtcatcatttacatcattggcaaaatccaacatggtttccttaatgcggtttacagtttcatcggagacagctgtctctgaataatatccaacatataaatcatattgcggagtattcacaatctcaaatacagtaattgcaacaactattaatgccgctgcaattccgattatccaccattttttataataccaaaagtttgccattctatctttaaccggcagttcctttgtcatagctttagcctcacgggcatctctgtccataataccacctctgtatgtgatttaactccgcaaatatccctttttacactaataaataaaataactgctaatcaagcggcttcattgtcgggaacaataagacgtcacgtattgaactgctgtcggtcagcaacataacaagcctgtcaatacctatacccagaccgccagttggaggaagtccgtattcaagcgcattaacgtaatcctcatccatcatgtttgcctcatcatcaccctgctctctcttctcgacctgactcataaaacgttccttttggtcgattgggtcattaagctctgaaaacgcgtttccaaactctctgcgggtaataaatatttcaaaacgctcagtaaattcagggttgtccgcaaatcttttagcaagaggagaaatctcaacaggatactcataaataaacgtaggctgaacaagttcctcttctaccttttcctcaaacactaggctgataatttcaccgcgggaaagcttaggcgcgtcagcgtcacattcaacgccgatagattttgcaagttcttccgcctcttccgccgtcttagtctgtgaaaaatcaacacctgtatatttttttattgactcaagcattgtcattcttgcccacggctgacctaaatctatttcttcatcctgataagtaatttttgttgtgcccaaaacttcctgtgctacagttttaataagatcttcagtaagctccatcattcccaaataatcggtgtatgcctcatatagttcaattgttgtgaattcaggattatgcttaacatccattccttcatttctgaaaagtcttcccatttcgtatactttttcaaaaccgccgactatgagacgcttcaaatataactcaggcgcaattctaagatacatatcaatatccaaagtattgtggtgagtaataaatggacgcgctgctgctcctcccggtattgtattgagaataggagtttcaacttccatataacctctgctgtccaaatagtttctgatagctctgattatacggcttctgagttcaaacgttctcttaacatccggattcatgataaggtcaacatatctctgcctatatctcaaatctgtatttgtaagaccatgatatttttcaggcagcggccgcaaagatttagaaagaagcactatcttagatgctcttacagatatctcgcccttttgagtggtaaacacctctcctgtcactccgacaatatcacctatatcatatttcttatataccttatattcgtcgtctcccaattcgtcacgcttaacacaaagctgaatccttccgcttctatctgccaaatctgcaaacgacatttttcccattacacgcttagacataagacggccggctattgagacaactttgccttcaaaatcagcataattttcctttatgtctcctgccatatctgttcgttcatatgaagtgatttcaaaaggattagcaccgctttcctgcagcacagcaagtttttcacgtctaatctttaaaacctcgttcaaatcactttcagtattattcttttgttgattattctcgctcatttttccctccaactattattctgatacgctcagaaaattaagaaatctttaaaatcttatattgaataactccggcaggcgcatccacatcaatcatttcgccttcagcctttcccataagtgacttgccaagaggagactcgtctgagagccttccctcatcagggtcagcttctgtagaaccaacaattttatatgttatatcttcatcaaattcaatatcgtgaatagtaacggttgcgccaagttcaacttttgacgtatcgcgttcgctctcatcaatcactatagcgtttttcagcatattctcaacagagacaattcgggcctcaacctgagcttgttcattttttgcctcatcgtattccgagttctcggaaagatctccaaatccaagagcaacttttattttttcagaaacttcttttctttttttagtctttaaatattcaagttcttcctcaagctgcttaagaccgtcctcagtcaactttacctgtttattgtccattcttattacctccgatatttttatatatcaactaaaccttctgtgattaacttataaattatactttaataactataaaatgtcaatacacattaattatatttatgtctttttatactgtcaccaaacgctcacccaaatataatcccacggtatcaccattcttatcctttgcagtcccggtaacgcataaatctcttccgcatcttagcttaccgttattgaaatcaattattacctgatatctgcacttttgtgattcagaaacatccagcaccataatcggaagaccaaattttgaataaacataatctgcagtcttattaccggctgaaatattcttggtatatatcgttacatatttaaactctctgcaaaccaaattcattactgtgttaagccctcttaaatcatcgacatcgtcaacgattatacctgctcctgctttaaacccaggagtattcaaaagactcaaaacatatttaattgatatttcaatattatcgcagccaatcggcactttaaccggatactctgcagtctgtttttccgtaagcttatttcggtcttgctgttcaatcaatatttttttattataaaacagttcttttataaaatgatataaatcttttatcttttgtgagatgaacttaaaaaatgacatagttcactccaccaatcttagtattatttctttctaaaagctattttgaaacagaattcaaataattcactgccgcagataattgttcatcctcctcaagagttaagttatcaagattagcgtacttatttaattccataggcaccgtctcatcaggttctataccaagtttatggatacaagttccgttcggagtataatatctcgcaattgttacagaaacaattccgtcacctaaaccgaaaacagactgaacaattcccttaccataagatttttctcctatcacatgagctaatccataatctttcaaagccccggttactatttcgcttgcggatgcggaaccctgatttataagaaccgtaacgggtatataatactgctttccatttgatttataatcttccctgtttcctttcttatcaagagtgtataccacatcttcaccgctcttaacaaaattggatgcgacatccacagcagcttcaatatatccgcctggattatttcttaaatccaaaaccaaagatttagctccgtcagaagttaatttgctcaaagccttattaaaatcatcaccggtactttcaacaaactgtgatattgatatatagcctatattagttccgtcaattatttttgactttactgttttaacgttaatatgctgacgctctaccgtaaggcttaccgtttcacctgactcggccttcaagacctcaatatcaacagtcgttccggtttgtcctttcatatttctgaccgcctcgttgatttgctctccggtataacttactcccgctacttttaaaattttatcaccgcttaccaaaccaactttttcagccggagtgtctgatatagctgacacaacggttattgtattgtcttcgatattattttctatatacacgccaatcccatcaaagcttccgctgacatcttccatatattcatcagcctcttcgccgtaaatgtaattagtatacgcgtcttctgtcccctgagcaaatccctcaatggagctgtttacataatccgacatgggaacgtcttcataatacatattttttattgtgtttgtaactgttgaaaactttataaagtcaagataatttgtaaatccaaaaggatttacaagacctacggtaagcacagcagtcacaacaattaataaaaccgaacaaacaatcaatacccgtttttttatatacatattctgctccttaaaaatatattaccaaactaaaatcaaagaaccttactgcaaaatttatccgcattcataaagcggatcataaaagtattcttaaatcgtaagaataacattatcatccgctttagtataaataatcccaatacaaatttatgccattaaaacaaaaatgacgcggctatgcccgagcaaataccaattaaaaatattgccgctataactatagcagtaaccttcacagcctttttactcatcgtaattcctccaatcaaaataataaaccacaagggcggaaagcgacaaaaaactcgcttaaaaccgcccccactaattaatcatattatccacggcctaaatttattcagccgcacaaattacatactaaagcctagttggctgagatgacaaatatttatttaccatcatcgctaccttaaatataatagcgtcgtcaaattctctcaaatcaagaccggtaagcttctttattttatcaagcctatatactaatgtatttctgtgtacaaacagttttcttgaagtctctgaaacgttaagattattttcaaagaatttctgaatagtatatatagtctcgctgtcaagcacattaatagattctttcttaaatacctcgtccaggaacaattcacacaaagttgtaggcagctggtatatcagacggcctattcctaaattatcatagctgattatatccttctcggtatcaaacactttgccaacctcaagcgcaattcttgactccctatacgcctgggacaaatcctgaactctttcaacaagagttgaaataccaatgagcggagtaatcatagcttcagcgcccaaagtgtcaaaaatattctgagcgataaccataatttcttccttagtaggttctgttctaaattccttaacaacaacagcgtcccgctcgtcaacacggataacataatcgtttgctttatcagggaaaagattgtttaatatctcaaggtatccctggtcggtctcctcaacaaccctgattaaataaacaactctggggcactcaacattaatatgaagttccttagttctataaagaacatctcccggcagaacattatcaacgataatatttttaacaaagcttgccttgtcatatttttcgtcataatactgcttaatggtcaaaaagttcacagcaaggaatgaacacgcatttctggcaatatcgtcgtctccctcgcagaaaacaacaaactcacacttactgaatgtttctatttttttatagcaggctcccgccaccgtctttacttcacctgtagcagaaaaaactgtaaaaatattatcaacagtatttccgattttatcctcatcactgcacgcgatgattgtgtcgctgtcatcaataactcccagcgtcctttgaacttctcttttcaattgtacaagcgtattttgaaatactctgccctgcacattcgacaccccctgcaaatatatttgtacagataattttacctaattgttattataacttaaaatttcaaataatgcaacacaaattgtacaaaattaataaaaatgtcacaaaatacaaacatccccgtaaaaacgttatttctaaagtctcgttttattatttacaccattttgacaccgttctgcttttcatcaccaattttctaataatgctacccctttatctacttgagtttttaaaatgtgattatagtcttgtgttatttcaacatttttatgacctacccagtttgaaactacatttagaggcactccagcatacgcagataatgttacgaatgtatgtcttaaaccatgagatactatctccttttccgattgtattcttttcagcaaatcattaattctatatataaataacgttgaagaaacatatgtatcatttaatgtggcacttattctattacttgttatacccaatttttgctgtatttatattatcttttctattacttcaattgcctttgatttcaatggaattgttcgcattctttcagaaaatgtagtaacaacaactttatttttatacacactatttaaccagtctaaacagtaatcttgaaataacatatacgaatcttgtgtttcaaaattgccttttgcgacctcttttttatactctctaagttttcgttttactgcggattctgttttagcatagccataatgaggcttgaccatttcttcattttgatatttaaatacccatctaccatcctttctttgatatatgctccttgctattactaatataccgaggtttgatattaaagatatttcttattcagacattaataaaaacaatttgcataccaaaccaccgataagatcttacaactatgaattaataaatggagacaatgatgtaaagtttcgccctgacaataagtatcaaaattaggatcttaattgttaaactctatataataacattcatctaatattttaccgttattaccattatctgaagttaaaatcagtaaaataataattgttaacttatcccaatatgttttttctactcttatcgtgttgctgtctaaatttgttgttacatacgttccgatgtcattgtttttattaccattagaattagagtcccaacttttcactaaatccctgtattcattataatccaaaatcgttgtatttttaatactattttgttcattatcgcatattatgtttcttactgtttccaatttgttctttttttaacatcttaccatacctccgcttacttggatagctgaaaaacaaggctcatgtgcaatatatctcatatggttagaaatatatatttgatagaatattcacatattttatagattgggagtgaaatgatgaatatcttaaaaaagtgctttagtaaaacactatactttagaagaatggaactaaaattaaatcaagagaaaatggcggaaaaatgctgtctatcgccacgtcaatacacagatttagaaaatgggaaaagactcccgtcttttaggagtttaattaatataattataaatggcggcatagacttaaatttatttattgaagaaattatcaaagctggatacgtacctgaagattcagtaggtaaataaattttaggtttataaacaaatagaaataggcttcttataattttttaagaagcctatttgtcattatttatttatttaaatcttataactaaaaattttataaaatctctaatttatatcaattcgatactgttcactgttccatgttacgttcggtgttattgacatctctatcgctgtcagcggaacatatgcaacatcatctatcattgtcatcggataacccatatcatacgattctccatttactattatacctttgttatccaacatcatataaatatagtttccgttatattccattgcaattgatttatactcattattccaatcaatagtttttgctcctaaatatttatatatttcatccattggcagcatgataatcccatattttataaccggctgatcataaaattccagctctgtattatttaaattaactgatataactggcttgccatctaaaacatatggatcttctttggttcctgttccggataatataatagcattctcagtgtttaaataaaatgccggacgtattccttttttctcagttaccgaactttttgtatatttgtcacctactttaaaatcaatattactatacggaagatgatgcatattttgtgtatcttctaatacttctccgcttattatgcaaccatttattccagcttctgcttcattagcattatatggacttcttatccaataagcataattataattcgccttctcatattcaaattttagaccctcagataattgtgatactgcagaatcaaatgatttaaaaatattatatatttgttcctcttctaacaaaaatattttgtcttgtgttatatttttaacaccaccttttccagtaatcatatatccgactcttggaattgtataataattatctccatgtgcatttgtttcaccatacatatttttaaataatccaaatggatattttattatatctttagaaactcgctcaataggccaatatgtttgaatattactattaatcattatacttctttgactattagtaaaatttgttcttgatataaaaccactttctttattatattcaacaatatttaaatctgtcgaattaagccattttcttattgatgactccttccaaaaatttgtttctttattatgtaaatcttctactgtatcaaattctttaaaacacagtattttatcggaatataacaaaactttcgattccatatcaatgttatagttgatttcatcaaaatagaattttccattgtcaaatttgcctatttcatatttatcattataatccgatttttttataattatattattagtttcgtcatagattgcatcattactgaaaattttattattatcattatttacatatctccacaaaataggttcatcattgtactttcccattaagaaataatctccttgctttaattcgggcaaagattgcaaattttctgtttgcgcaacacacaatgaggtgttcagtgaaaatattattgttataactataataaaattcatcaattttttctttgtttatttctccagtaattccttatttgcatttcttttataggttgtacaacatcagcatatgctgatgttgtacttatcaatatcgttactgcaaatataacaattactattcttgttatttttttcatactttttcctctgtttaactttattttgtatttatgtcaattcgatactgttcgccgttccatgttacgttcggtgttattgacatttctatcgctgtcagcggtatatatgctacatcttctatcattgtcattggataacctaagtcgtatatctctccatttatcattattcctttgttatctcttaacatatagatgtagtttccatccttttctattgtgacagattgggtttcttcatcccaatttacttttgctcctaatttcttaaaagtttctttcaccggtaacattactattccgtcttttattgttgcctggtcacccatttctgcttttgtcccatttgtatatacttctatttctcttcctgtcattatatatggctcttctgctgttccacttcccgataatattactgcattatcttcgtctaagtaaaatgccggacggattccattggcaaaaaaagaattgcttccttgatattttccttcattagatatttctgagcaagatgaactttgcggagttcgaagaaaataactataatattcgctactaaaataatatagctgcgattcacaacttttagcacgtaaagatttaacattactaaaattattcaaaatattatagatttgtagctcatccattaaaaatatggtatctgtcaactcatatgctgcgcctatatatatatttgataattcagaaatatcgtaaaattcaaaatatcctcctgcctctggtcttccaggtttatattttttaaacgcattgtattgttctgtttctccattggttgataattcaatatgctcttgcggcaacatagtcaactgtgttaccgttttaaacaaatttttttctaataatgaaaaattactcttatgcaaaaaccctttttcctttaaattaagattttcatctatccatccatctttatatgattctaagttccaaatttcctctccttcagattttgtagaatttaaccatcttctaatatatgattcttcccaaaagttattttttccaaatggtttaaaacacaatatcttatcacttactatgagtttaccattttgatcatctgctacatatctccatactattggttcatcattatattttcctaaaataaagtaatctcccatttgcatttcttttataggttgtacaacatcagcatatgctgatgttgtacttatcaatatcgttactgcaaatataacaattactattcttgttatttttttcatactttttcctctgtttaactttattttgtatttatatcaattcgatactgttcgccgttccatgttacgttcggtgttattgatttttctattgctgtcagcggaacatatgctacatcatctatcattgtcattggatatcccatatcatacgattttccatttactattatacctttgttatccaacatcatataaatatagtttccgttatattccattgcaattgatttatactcattattccaatcaatagtttttgctcctaaatatttatatatttcatccattggcagcatgataatcccatcttttataaccggctgatcataaaaatctaactctgtattatttaaattaactgatataactggcttgccatctaaaacatatggatcttctttggttcctgttccggataatataatagcactctcagtgtttaaataaaatgccggacgtattccttttttctcagttaccgaactttttgtatatttgtcacctactttaaaatcaatattactatacggaagatgatgcatattttgtgtatcttctaatacttctccgcttattatgcaaccatttattccagcttctgcttcattagcattatatggacttcttatccaataagcataattataattcgccttctcatattcaaattttagaccctcagataattgtgatactgcagaatcaaatgatttaaaaatattatatatttgttcctcttctaacaaaaatattttgtcttgtgttatatttttaacaccaccttttccagtaatcatatatccgactcttggaattgtataataattatctccatgtgcatttgtttcaccatacatatttttaaataatccaaatggatattttattatatctttagaaactcgctcgataggccaatatgtttgaatattactattaatcattatacttctttgactattagtaaaatttgttcttgatataaaaccactttctttattatattcaacaatatttaaatctgtcgaattaagccattttcttattgatgactccttccaaaaatttgtttctttattatgtaaatcttctactgtatcaaattctttaaaacacagtattttatcagaatataacaaaactttcgattccatatcaatgttatagttgatttcatcaaaatagaattttccattgtcaaatttgcctatttcatatttatcattataatccgatttttttataattatattattagtttcgtcatatattgcatcattactgaaaattttattattatcattatttacatatctccacaaaataggttcatcattgtactttcccattaagaaataatctccttgctttaattcgggcaaagattgcaaattttctgtttgcgcaacacacaatgaggtgtttagtgaaaatattattgttataattataattaaattcatcaattttttcattatttatttctcctatctattatttaaaaagtttaaaagttgggattctccatttttaaatccccaatcatttttaaataatccatttagtatatcaaaaataatattaccatgatatctactaaactcatcaaaacgcaacccattatatggctgattagtgtctatatctccagggacaaagtaaacactatcaaaattgcttcctattactttattactaaatgcacttgaatttctgagattcatttcattcgggcctccagcatatatcccaaaagctcttctataaccgtcaacctgaccggtaactaaaggataaaatctattaatatattctgcaaaacgcgctcttttttcttctggtaaagttcctcgcggcccaccattattatttccgttgttatgccatcgacccgtaactaatccaatgtctacctcgaattcaacaccaactattgtattagttgttttagctccaccgacttcttcattatttacaatgacacgtctatatagaacactattatatatatccgttaacttttgatcaaaataatcagtttgttccactccaatttctgagtagtagtatccaggttgtaatatagctacatcaaataaatcatgatctccattttcatctatatattttccatgatttatagtatatcccacattggtaaattcttgttcattggtaaaatatggtatcaaaataagatctccaccatcatcatgaacatactttgacaccttagacataaaactatagctaacagtatcagtagttatatcatctggattctctcttccataatataatccgcctattattgtatcatcacccaatttgtttaccacaccatcaaccatatctttgaccaatgtggcataatccccacttgtatccgttgtaggtgaaaattcaggcgtacctaaaaagaatgaaggcatggataattctggatgttcttctataactctttgagctagttttattaaatatgcataatcatttatcatattctctttgatctgctgattattactattatcatattcaatgtattctgcatcacgtacttggagaacaatattaacatttccaccagtagcagtcatcaatgctaacatatcttcatacgtatatgaagaatttatatactcattattttcatcagtatatttgatatatccattgtctttatcattatagcgttcctctccctttgcggtgtataaaactaaaaatggatcgtcagcattatactcaccaaaaaagccaaaccagtcaacatatgtcattggattattcgcacaatatgtatacaagttcaaactaagcgggtcactcgcatctcctctatatgtatcttcctgtataaaccgtgctgtttctgcatcatagaatctggatttcaaataatataactctgtctcattatcatattcgtatccgctgtatctgtatggattttctatatctccggtctctcctgtgatatttccaaacgagtcgtattcatatgctgccgcaatatttccgctcttttctgttagcgctgtaacgtctccatgtccattataatgatacgtatactttttatcattagactcccttgttatcaaatttgttccatatacgttccttgctgtttggtttccttctccgtctgtctctaatactattttatcatactcatagagatatttgcaagtatttccatttactgttttagataccctgtttccttctccgttataaacattggaaattacattgcttccctgatatgtttttactagacggttgaacacgtcatattcatataccgcacctatttctgagtcatcatctagtcccagcagctttatttccagttctgtttcctctccgtcgtctgatttttccactccttggaacttactgtgtatatttccgttattatcataattatatgttaccgtctttttggtatttccaacagtctgaaccgtgtctgtcagacgctcctgttcgttataattatacgttgttaatgatattattccggattctgtaactgtttcagtttttctgtttccggctttgtcatatgtataggacgtctgcttatttgacggttcggttaccgtctttaatctgtttgcttcatcataggtgtattttgttgcacccttgtctgcacctgactcagtttcttctttatatatcagattttttgccttatcatacgcatatgaatatgaacttattatagtatcagcagaagttttgttcacaatgcttgataaagttccgtcattattatactcaaattcagctttggaaccgtctgcatttgttattttattttgagcgccgtttaaataatattcatatgttgttggctccgcattttctgcatccttgacagtgtgcagtctgttgtttttatcataagtctttatcgttacgtttttctttggatcaacagtcttttctgatacttctccgttatttatcaatggcgttatatcatattggtaagtcgttgttccaataccgggaacatccttggtcaaaactctgcccaatttatcgtatgttctggttgtcgttccgctttcgtcctgcattgtcagtttattgttggctccatcgtacgtattatgtattaagacattatcgccgagtttagtatctgtaagcctgtcgtgcacatcgtaaacaaaagataatgttacaccatttctatcggttttctctatcacatttccacgctcatcatacttatagctttctgtctttgaagctatacctatgccgccatggtcaattttagcggtcatttcatttcggatattgtattggaatgtagtcgtatgtccttcgccattggtttgcgtctcaagatttccaaataagtcgtaagcatatctgttggtttctaaaaccccttcaacattctggcttgtagttattagtcttcccagttcatcatattcataatatgtggtatttccttttccgtcatattttgaagaaatttgccccgcacgattataggtttgtcccgttacgctgactacaggatccattgttgatattaaacgattgtttttgtcgtactcataagtagtttgattatttaatgcgtcatctgatcttatttgaaggtcattatcgttataatacaatttctctattacagtttcattggcatcctttttcttaatcagcctatttaaagggtcatattcataagaaagagtattgcctctccagtctgtctcagtttttatattgccatttttatcgtacgtatactttgtggagtgaatatcaactgtttcgatttctcggttaaaaccatcgtatttatgttcaacaacattttgtttatccccagtgttgccatccatttcaaatcttacatttccgcggctgtcatacaaattttgagttgttatagcttctgtaccgtcctgtttgcttacagttgcagaaatattgtttcctaatttatcatatccatatatttcgagacgttctgttccaattgtttttcttgtcatatttcccaaagcgtcatatttaatagttacattgctttcgggtgctgtttcatcatgaggagaataactttcagtcaattgattacgctcattatatttgtaaatatactttctatcaggagtgtttaaataggtctcaacaagatttttattcaaatcatacttattatgactctctacagtcttctgagttccatcaggctgagtcacaactgttgactgaacagctgtattttgattatcttcataagtataaacagtatcatgttttgcgctgtcggtttctaccactactcgtcccagagcgtcatatgaatattttttactgtaggaatatttattttcttgtgcaaccgggtctttttccataaacagcttattgtccaggttatatacatatctggtgctgttgcctaaagcgtctgttttttctacaatgttactgtttttatcatatttataagtattttttatgacctttttccacgcataattatcgtttgggtctttatagcgttctattacttttgttaaccgtcctaatatatcatagtcatattcagtacggttcatctcatttggattatcagaaaactcgtcaaggtacaaagtttcatagctcactacaccatcatcggaataattttcaggcgatatctccataagcacttttcctgttatatccaaatagtataaggccgtatttttagtttctttagctccttcataagatatattttctaccttttgttcaaataaataataataacctaaaacacttttaatatatttgtatgcatcttttctttgagaatatattgttttagaaatgatagtgctgtttcctccaactatttcttcagatacagactcttttaaattatcttgccagtctaatttttgtgactccttataaattccatttacggtttttcctgaatgattaacaaaacttccttccgaagctgtagaaatttttctgtctaatccgtcatattcatatttaatactgcttctgttaggcaatgttatctcggctaaattaccgttttgatagacatattctgttgttaatatggcataatctccttcaatctcataattatcattatccgataattctagactgtctttttttacatattcatttttacgggttggtgttccaaaatatttattttcatatgtgattatatttccatttttgttttctttaactaaattgccgtctttatcatattcatatgcagtgactgaaccattacttgcagctacactcttcacattcccatttgaaaaataactgtattcattaataataaagtcagaagccaaaacagcctgtccttctttattatatagctgccgatattccgtatcactcggcagtacattttcattattatccagcggtatactaacaggctgtgaacaaacatattctttttttacgtttccattattataatactctttttttgtatatctaaaatatgttgaattattagaaacgtcaatagcttcccatatttcaaccggcctgtttaaattatcataaagataataagttatatttccgcttgagttaaatgattttgaaattgtgccgtttttattataaatattttttgtattatttgatggatcagattttgtgtcctttacattttcaattacatctccacgataattatataaatttttatcattatagaaataattatctaatgtattatttttttcagatcgcacaaattttgaaattattttacttttatcgcaataaattttgttttcatctagttctctttctacatgattcaatgatagcgactttatttccccactattcttatcagtaaattcataagacttgcttgtatttctatccaaacaatcataatcatatgtatatatttctccatcaggagtgcattgccatattatgttgttctttttatatgaatacttcattacatctctttgcccatctatttcggggtatttaattgttttaatttcattgtaacctgccccaatggtatcattatattcatattctgtcgcataatcataatttcccaataatttttcaaaatttgcataataataagtcagcattataccgtcaaaatttattctgaaatttgctacactctcataagaactgcaattattttcagcatatgcagagacacttatttcttttatttttctacctaacaagtcataaacatccctagatacttgttcatgattttctgtatcactttttacagttttatatgtgttaccattattgtcaatataacttttaacagatacgcctagcggagaagttgtgctgctctcaaagccaatcacaaatttattatcctttgattcatctaataatgaagaatattctattgaatgcattcccgcagaaacgtcatttgtatcaatataatcaacacggcgttcaaaagtatcaaataatatttcctctcccggtttgtatggttttgatgctgtaataatgtttccatatttatcataagaatatgaagttatattcccttcgccatctattacttgttcaattaaacttgtatatggacagccgtattttgaatcatcggcgtatacgtaactttcaacaatgaattttgttgggttttgtgaaatatattcattaatcaaacttttatctgagatgttaggaaatcctttatctaaataacttgctttttttgtaagcaaatttttatcattgtatacgaataaagtacaattattttcctcatcaacactgccaattacattatttttattatcgtaccaaaaaaatttcgaactaccgtcaggattgattgtttcggttatatttccagtgttttcatcccgtatatatgtggttatatttccatatgaatcacctgatgccgaacattcctgaacgacctccccatagtttttaccattaggacgataatactgtctctccgtaaccgcactagttttaactggtaattcagttttataagtatacatatatgaatcataatactctcttctttgaacactatcattttctctatcaattatagtcttcatatatctatatctaaacgtatatgtttcaccatatgcgtctctataactcatcactttgccataatcgggatcatacgaattgagattatattccacgaaaagtatcacatcagaattatttatatttcccgtatgctgtcgtatcctttttataaatatgtctgtgtcaggaatattcccatctgacgtaattacattatttttatatgaatattcaaagtatgtgctattccccattatatctgtatatgaatataatgttactgacattgttgatgtactttgaacatatgtatagtaaacagctcttccataaggatcaattatactggctatttggtaagcaggtttattgttagtattataattcaccatatattttcggtttgcactatctaatatatatgaaacaaaataataatctttatcataaacaatttttactactgtatttccggttttatcctttatttctgtcagtttaaacttatttccatttgtacggctattataaatatattgcttttgttcttgagtagttaatgtaaactgcgtatcactatcttttaccaacgaatttctagtagtctgacttgagtattctccatttgtgtcactagtaaaaatattagtgcttccatttggcatcacgacagataacttattgtatgctgacccattcaatttatttatttttgaatccagcattgatgaccaaccggctccaaacacgttttcactattttgatcaagagaattataaaaacgttcaaatataaaattttcgcccggagaataatcattaaaatctactacagaaaatgaaaaatttccgctagcgggatttactccgctttctccataatgaacgccctgtgcgattattggttctatttctccgccttcactgaatgttgacgtttcatcagatacggcttcaacactcgcttcattggatataaagcgttcgttttcctcctcgctaaataaaactgcatcagaaacaggagcaatctcatcagatatacacgcatatgcgtcaactatacctccgcttttaacttttccttcataatctataaattttctaacgttattttttatcttttcggaaatatcagttgcggtcatttcatgattactactcttaattaaagcagcaacacccgtaacatatgctgcagacaaagatgttccgctatataaataataatcttctcctgtacttgtagattttatttcttctccgggagctaatacatcaacaccattaccatagttagaaaaatatgaaagctttccttccccatttattgagcctacagatattacattcggcaaatcataacttgccggatacagcggattcacattagtattttcactattattgcccgcagaacaaacaaataagatgctgctatcctccattgtttctttcaatataggattatattcttcacagctaaaactacagtttataattttaatatctttgttctttgcataatcaatggcttttactgcatcgcttgtatagcctttatagctattcataaatttaagaggcagtatattcacattgctcgctatgccgcatatgcctttaccatcatctttcgatgaaataattccggctatagctgttccgtgtttatcattttcttcatcataaatattattgttattatctataaaattatatccatcatctcttatttttcctaataaatcaggatgtttataatttattcctgtatctaacacacctacagttacagcagcatctccatgagtaatttcccaagcaggctcaatatttatatccaatccatgatccgaattgtcgtttttaagaccccattgatatgtataatagtcatccgataattcattagctctaagtaaataatttggctgcgcaaattcgacattttcgttttcttctatttcatttataaacaactccattttttccggttcacttagctctatcagttcaatattattagacaaactctctcttgctttgatactttcaaaagaaactttatctgtacattcgggtttatattttactattatacaagcatttttatcttctatggtttcattgttacttgagttccaaaaattaaattctactgcatatacatttaaaccaaacaatataataaaaattgatatgcaaattaatattttatacttttttatatttctcatttatttctcccccaacctttaattaataccaacagtttcagtatacgtaacaatatgattacttaaatcttttgttgtatccccctgatacttttcagcaatcatatcacgtatttgcacatcaacaatatactcgccaccatctccatttatccattgattataataagaagatgtcatccaatcgctatatgccgtttgttcagcaccacttggatatactctgtatctatatggacgttgtgctaaacctatagtatcatcagcgtttataacgtttacttctatatcatcatcatttctttcaacatttatactatcatatttgggcggggtatcatcatataaaagcgaatttctatgagattttattaatttacttccatagatgtactgagctgaaaactcaatataattgggagatatttcgccatctgtcatctgtgaaggaacaaattgtaacaaaggaacattagaaaaagtattagtatttatattaatatcagaagtacctatttcattatcaagtgtacttgaatttttaatatagctataacttacattcatctcatcatttcctaatattgagacaagtggctcaattgtatcaaattcacaattcaattgcatttgtaaaggattgcgaattaacagtattggttgaggttgatattcacttctttttatctttaaagtatagtcaccaaatccattatatactttaaaataacaatctccatgtgtgtggttaaaactaaagttactatcaatctgtttaatatctccttttccagtcgtcaatgatgacgcatataatgtgtctccgatataaatatcaagttctcccggataatcatattcatgttcaaattcgttatatgactcattactaaaattaacagtcaacatacatggttctgaagctgaatatttatatatgtcaatatctgttccggaaactgcaactttacccaaattactatgtattatttcatcatatgtttcacttttattgatatcttctgttattggagttgcattataaaaccagttatttggttcatatttgtcattgactgtagatggaaaaacttcagtagtaatttctacctccatttcccaatatggattatttatgagtaaataatgttcacctttacctaaataatcttgtattaaataaagttcgttaccataaaattctgtaccatgttttgtagattcaccatcaatatataaagtcgcggataactgttctaatccagtttctgtttttatcttaaaatacacatcatataacttgtctgtagaaattttaaaccaattatctccataagataatagatattttgaacttccattataatataaatctggagcattttgatccggatataaagcttcaaccggaatataaaaacctaatgccataataaatattaactgaaataaaaccacaatttttatttttgatttcatttttctcccccttaattattagttactctaatctcagttgtaccatcagcagtcgcttttaacttaattgcattaaaaaatcctgtatattggtttccaaaacttaaacttaaagatttcttaaatttaatttcccctggactgcatgccgaaattgtaatattacttccaacagcttctcccggcatggtatctattaaatacgtctgagaaaccgcatccactaattcaaacttagtggaatcatatccaaaacaaatctctaaattgctgaaatctaatacattattaacttttaataaaattatatattcctgaccgtttgatatattaactgtctttgttttaccatatgataccactgacactattgttattttctgtggtatattgctcataatccccaattgccccgaattatttttaccgaaagaatatagttttccatctctgcttattgctactgaaaaggctcttccgcatgatgtctgttttatgttttttccgtttaatgtcgttatttcttttgggtttaatgttgaacctgttacaaaaaatcccagttgtccatctgaaccatatccccagccatatactgttccatcattttttacggctaatgaactgctatcaccagcagaaatattttttattcctgttataccttttatttttgttggtatatttctgttatttttatctcccaatcctaaccttccgcttccgttatttccccatgaatagacgttgccaaagttagttaaaccaaggcagaagtttgttcctgctgatatatcagtaaaatattctccgttttccagttctgcattcagttttacaggtatatattcatcatccgttgttccgtttccaatctgtccgtctgtgtttgctccccatgaatacagtccgtcctcggctaaagctacaacaaatgattctcctgcgctcacctttttaaaagtcttcattgacgttatttgtgtcggtgttaaataatcatctgtattcccttgtcctatttgacctttatcgtttttgcctactccccaaatagttccgtcattctttaaaaatatgctgaactctgttccggctgctatttgttttacattagaaattccggtcattttagacgctttctttacctttcctcccaacgttcccattgggttattcgtattgcttccccagcaccacacgtctccgtttttatccagcaccaaattatgatttttaccgcggctcacttgggttggattttctattccatcaatcacagtcgggtatgtttttgtttccattttatccgaaccgtttgcataataaccttctccccaggcgattacttgtccgagttcatttattgccaaggtctgcgtgcggtatgaatctacttgttttactgcatatggataatctacttctacaggacttactgttatattatttttcaaagatttaccggcagccatatttccccaacggtataactcaccgtctgcatttgctgccaaacatgtttctcctatatcaacttcagttatgtcgcttaaaccttctacagcctgatatgatttattctgtgtttcagcaacactaccgcattgatacacttttccatcagccatatatgcagtggaattggctccggcaaatatctctcctgcaaagagcattgtatctgttggactgctggtatatgttgcactgtttggcaatgttatacctaactgatcatatgtattatctccacacacaaaaagctttccgctgttagtcaaaatagcagtatgattatttccgcatgacacatcttttacattattcataacaaacgcaggctgacttttattttcagtatccgaagttccaagctgtcccttgtcattttttcctaatgcatataaattggaattttcatcaattatatacgattgataatcccctgcggctatctttttagcatttgagaaaagtcgtgtataactgctgcctgatatactgtctaaaataatttgtccataagtattatctccccatgccataacctcgccatttttcgccagtgcaattacgtgttctaatcctgccgctacatcaattactgcgattgcaatcaatataggaacatttttatcaatattagtattgtcatgtaattgatatttgtcatttctaccccatccgtataccttattatcttctgtcagaacaaatgaagtatccgcacatgtttcagctttcactatttttttacttccccaaggcccatggacttcagcaaaatcttcacgcgatacattatcactcgttcccaattgtccgtatgtattatcgccttttgtaaataacttaccatctttatcaacatataatatatgattagaaccactgcttatatttttatgctccaaatcaccgtaataattatttataggactgtttgatgatactgtagaaccgtttccaaactgtccatatgaattatctccccaacgccatacattaccgtttgcatccaatgctacagtatgattatttcctgctgctatctgtgttatattagtcataccttttacagcgtaaggttcatacctattattatgagttccgtctccgatttgtccgcggagattgtatccccaggtcataacagttccgtcactcagttttataatagtatgttccttaccacattttacatctgttatttctatgttttcagtcagcttcaaatctatgtgagaatacgtttcattaatatcttctattccacactgtccccatttattagaacctcgtacatatatattgttaccttcatctattattgtcacatgattttgacctgtatcataaacactactaaattctacaggctcaggcttaagaatggtattcaaattatactctccaattattttgtggtcattcgcaccacatcccattactaatgctcctgaattaaaaaaggtatgcttaccatatgatttatataattgaccaggaatattttctatttttgtttgttcagaaataacatctctattttctaaacataactgtccataattatttacgccttgaacaaaaacaccatttgagctgcaaataaaagtggtctgtgaaccagcttcaatagaaaccacattagacacaggaaacgtagttggaagtgaaaattttcttatatctgaatatgaaactgcatgagcactattattcccccacaaatatgcagaacctctgctatctaaggctatacaatgattttcgccaattgacacatcaacaatgttgtttaaaccaattgctttaaccggaactgtataattattatagtttccgctacataactgtccatatgtgttatctcctgacatccataaagaaccgtcgctctttataaatgctgtgttgtttcctccggcttctacttgtactgttttaagtgagctaaacagttcccaattttcttccggtgttctttgatatccgttgacatcaaaatcgtctttcggcgatatttctattatcccatctgaaattatattgtttcctaaattactataactcagctttcgctgactatttactttatctttcaaattagataatttaaccgctgtattcagcagcgtttcttttatattttgaactccgtttgattctgccattgcagccccggctgtgacatatgctgctgacattgatgttccgctctgctcaccatattctcctcccggaagcgtgcttcttacatttcttccatacatcgctatatcaacattgtttccgtagtttgaatagtagctaaatcccatatcttcatttaatgatgtaacgcttatcacgttttctatatcaaaacttgctggatatatcggtgtttcgtctacatttgtcctactgtttcccgctgcgcaaacaaataacagtccgctgttttccattgcttctctcaatgcctgattattatctgcacttccccagctgcagtttacaatggttgctccctgttcttttgcatattctatcgcttttattaaatcacttgtatacgcttgtccattctcaaatgccgctattggtataatttccgtttcgggcacagttgacgatattattcccgtaacatgcgttccatgataatactgtcctatttggttttcttcatatgtaagttcagcattgtttactatattaaatccgtttactacatgtgaacttaaatcctgatgagtaatgtctactttactatcaattactgcaatcttaactccggtgcctttggttactcgccatcctgactgtatatcattctgtaaatcattatatgattccgtatcaatttcttcattctcttcagtttcagattctatattttcagtctcagattctacattctcagattctacattctcaggttcggaagtctcagttgtttcaggtacagggctttctgtttcactggtctcagcctgattttcaataacttctaagtccacacttatatcttctgtttctttattttccttttgaatatcttccttatttcgctcatcttccaaaagagttttatcactatcatttgaatctatatttttatcctcttctgctttgtctttacttccttcatctatatccgacaattcaagtttataatccggctgtatatactctatccttccgcttgccttttcgtatattttttcagtgaatatttccggatctactttttcagatagttttattacacttttatctcggtcaatctcatatacaggctcatctgaaaaggccgatatatcaccggtattctcttcacctattaaatcacgaacacttttagataccacaatctcttcatcattttccgatatttttaaaaactcttcttcattactaccttttattgtctctaattcctgttgttttactttatttgattcatcgcacgcatatcctacagcttcttcaatatccccattatattttataataaatctgttagtatactcttctgccagctgttctaattgttcagaaaccgatgtttgttcccctgataatccttgatttgtcgcgttttcactatcttcatctgcattaattaaaacagtagatgtagaaacagaaaatacaactgcaataaccaaaaatagacttaataatttcttcatattctccctccaacttatacttatactaaattttaaacttaacttctatcctccttttcattttaatattattttttatatattttttattatcatttttatttatgaaatattaatattctaaataaaatattttttggcatttttttcaaaatattactatggtataatctaccatagcgcatttcttttgtcaacaagattttgcatattttttgatttttcaggaaattaattacatatatttatttgtaatataaattcataaaacaaaaaaaggctaaaaatagccttttatattaaactttatttatttttatttatatcataaaatacaatcaaaaatttatcttatttatacataactatttcaaaaataatatatagataagagcagaatattttatcttcctataccattttagacataaacattttatatctaaaatagtattgtaatatatgagcaagttaccctttataatgctcatataatccaaattaaagataacaaatataataattaatatcgttacagtcaagttattataaataaaaactatttttatattaagtcataaaaatcttttatatataggtcggccgattttattaaatcagacctatcgccttccgctgacctgtcttcaacaatgacaacatccaaaggtatcatttttgccgtcttatacgcctgaagtatatcttcaaaaagcacagactcatcaggtacgccattaactcttgataaagtttcagtataaatcaaaggacttgacttgccctctccaacttcatcggcaaatgtcaaaacatcgaaatattccattattccgttatttttgagacatgcttcggtcaattctttcgagtttgctgttgccagcgccaccgtctttccttcacgctttaaattttcaagatattccgcggctcccggctttgtttttatctctttagcataaccgtcgtatatcatctcagtccattctctgtttacgtccttaggagacatgggtaattcaaaaagctcacatacgcgcttagagctttgctctaacgacatatatgcaacttcttttaaaagttccggcggagtttcataattatgacgattcagaaaatcaacaagcaggttatcccaaacccacatagagtctatcagcgtcccgtccaaatcaaatataaaatttttcttctttgataaaaactctttgccatttctatttgattcatttctcataatatttacaactccttaaccatttgagacagctgttttgagacagcataagggttctcgcttcccattatgcaggatacgacagccactccttctattccggagccatacagctgactgatattttcaggattgataccaccgatacccacaataggtatatcaacagattttctgacctgttttaacatgtcaattcccacatttgaagcgtcctttttggttgacgttgggaaaaccgcaccaactccaagataatcggctccatcattaagcgcctcaacagcttgattaacgtttcctgctgataatcctatgattttatttgaacctaaaattctccttgatacctttaaaggcatatcactctgccctatatgtattccgtctgcatccacagcaagcgcaatatcaattctgtcatttatcagcaatggtacatcataatgcttgcacagctttttaagttcagaagcctcagcaaaaaattccctggttgatatatctttttcacgcagctgaaccaaagttactccgccttttattgccgattcagtaacagaaagcagtttttctctgggacatatattagtatcggttactaaatacagtccataatttactttatccataattatctcccaatttataaattattagttataaatctctccgcgcttaatataatcctcatctgatagactataaatataatcgaatagtttaactctgaaagttccaataccctgttcggtctctttaacatattcataggcatactctccggcaatacccatcataaccaccgcggctattgctgccgcaagaggctcaccggctgcagctgctgcgcccgtcatagcgctgcacatacagccggttcctgtaacatcacatagcatctcatgtccattttttaaataaaatacctgaacaccgtcagagacaatatctacagctccagtagcacaaacaacgcttccggttttctctgcataccctcttaccagttccccaagctctaaacggttggtttcattaacagcgtcatcatctgacgcgtctacacctttgctgcttatattgccgccggtcagcgcgcgtatttctgacatatttcctcttattatatccggttttgtcagttctatcatctctctgcaggtttcatcccgaagctttgatgcccccgctccaaccgggtctaaaactattggctttccaagcctttttgcggctccggcagccgttttcatagcagacaaatatgtaccgtcaagcaatcctagatttattatcagcgcgctggatatattcatgatttcttccatctcacactcaatttctgccataataggagaagctcccatagctagcagcatatttgcacagtcatttatagtcacacggtttgtcaagcactcaaccaaaggacgagtgcttttcattctatttattaaatctattacttccttaagcattttgtcatttttattcatagctaaattatgtatcctttccgtctatgctgtcgttattatataataagttttaatttttaaaattaattagttcacatctgaggttaccaacatataaattatttttatatctgctcaccggttaacaatctctaaaacaataaatcttcataaaattaaaaagtggtattttatattaaccaaaaataaacatattgttttaaatatgttcacgctccgcgtgatatgtcagctcacctaacgaggcgtgcttgcacgcccttccgatgttcactaaaaacactgtatattagataaatctaaaatagaaaattaagtaaaaatgtggctttgcaggcatcggatgtgaccccaccttttaggtgggtgtgatgcaaagtgaattgtttttattaaccttcaatgagcttttttcaaaaatatagccctacctgccacaatacagttattatctactaataatcaagcttcttaataacatcttatattatataaaataatgattcacattactgataaaaatatcggtcttaacattttgttatttaattaaaaacttttatattttcttttaaaaaaatttctaaaactattccttttctatacatttaaattcaatttctacattcgggtctgacgttttccataaatcataaaaatgatgaatcggcccatttccttttcctatgcttaaaccgttttcaattccggttttcacatacttcttggcttcaccaaccgccaataccgcgtccattccctttgccatatttatacatatcgcagacgaaatcgaacagcctgttccatgagtgttttgtgtatgtattctgccgccttcaaatattgtcattgttcttccgttatacaataaatcattagcgttttctttgaggtgtccgccttttataagcacatatccgggacccatatcaccaataatctgagctgcctgccccatctcatgaatatttttaatctcctgcccgcacatatattcagcctcgggaatattcggtgtaaccatagttgcaagcggcaaaagacggttttttataacttcaacagcttcatcgctcagcagctttgaaccgcttgttgataccataacagggtctacaatcaatatcctgggcttatatacttccattgcgtctgccaccgcattggcaatatctgctgtagacaacatccctatctttactccatccacatttatatcgttaaatacagcgtctatttgcgctcttacaatttcaggcggaatattgtgcactgctgaaactcctgtcgtattttgggctgtcacagctgttatcacgctcattccatatccgccgttggcagcaaacgtttttaaatccgcctgtatgccggcaccgccgctcgaatccgaacctgctatagttaatagatttttcaaacccaaacacctctttcttaaattatccttatatgcctatatcttctccgccaagaatcttattcatatttttaactgcacactgttcaccgcacatggtacaagtattttcttcacgcggaaccgaacttgctctatacgcttttggtttctcggggtcaagtgcaagctcaaacattttatcccaatcaatctcacggcgggcgtcagacattttattatcccactccctggcgcctttcactccttttgcaatatctgccgcatgagcagctatctttgaagctataattccttctctcatatcatcaaggtcaggcagtctgaggtgttctgccggtgtaacatagcataggaaatccgctccgttggctgccgcaacagctccgccgatagcggaagtgatatggtcatatccgggcgcaacatccgttaccaaaggccccaaaacataaaacggagcgccgctgcaaatgcgtttttcagcaatcatgtttgcggctatctcgttcaatgccatatgacccggaccttcaaccataacctgcacgtccttcttccaggctcttcttgtcagttctcccaaaactataagctcagatatttgagcaggatctgtagcgtcatcaatacatccgggacggcaggcgtctcctaaactgatagttacatcatattcacggaatatatccaaaacttcatcataatactcataaaacggattttcatttcctgtcatttccatccaggcaaataaaagcgctccgcctcttgaaacaatattcattcgtcttctgttgtccttaactttctgagctgtagcgcggttgattcctgcatgtattgtcatgaagtcaaccccatcctcagcgtgctgacggacaactcttaaaaaatcatccttagttatatctttcagcttcttttcgcaatatcctattgtatcgtaaacaggaactgttccaagcatagcggttgaaatctctaatatcttttttctcatctcatgagtttttccgtaattagaaaggtccattatagcttcagctttcatatttatagcagttctaaccttttcgagttccaaatccatatccgcagcgtcgcgtgatattcccagattaacatttattttagtgcgcagcccctgacctattccttcaggtgacaatgtcttatgattcttatttgccggaatagcgacaactcccttagccaccaattccattaactcttcgggagacatattctccttttcagcaaccgtttttatttccggcgttaaaatgccgcgttttgccgcatccatttgtgtagtgtaatttctttccataataaaaaactccttttaaaatatttgcgcacaaaaaagtgcttacctacaacaaaggcaagcactaaaaaataaattctatctcttagattttgtgctttcctacgtcggtattaaccgccaggttcaaagggtcaagcatattgcttatctcaaccgccataaccgcggtccccccagcgctaactattataaacctaactgatataaattgcaagtctttttttaacaaacttacattatttacaaataaaaggttaaagcactctatcctataccgtaaagaatttttacagcttcggcacgcgtcacattattattaggtctgacagaaccgtctgtataaccgctcattatactctgagtcagcaaaagctcaatgctgcttctcgcccagtccggtatatcttctgcgtccaccgctgaaaccggagccgcataaagacctgaaggcattaaccttgccgatgcaactgaatattccgaccttttaatattagatgaaggcgagaagaaaaccctgtccccatcctgctgacctgtcattatacctaatgagtacatcgcctgaacctgcataaaggcccaatcaggtatttcatctttatcagcataaggaagctcaactccacggtaattataaacgtttaatcccaagtaattgcttatcatacaagcaaattccgctcttgtcatatttttgtccggtctgaaaacaaacccgttatccgtctcatatcctgaaacaaccttgcgtttagtcatatatgagatataatcccttgcccagtgttcattcgtatcctcaaaaatattggttaatgcagaaatatctccgacgcttaaggttttataagcgctgtatccctcatcatccgttacggatacagatatcaaatgaggattatttaaataatcctcagggtaaacatattcgacagtcatagtttcaggagaaaaactaaacttggttttaactccgtcgacagtcattttaatattgtcctcgtctataatcccatgtgttccgaatattttagccacaaaagcatttccggtatttgaacttgttatcgtcggataatcagtttccaaaggacgaggtgtggaggtcggtatctgttccggtccggctgaaaccgtaagatttacagaagccgagaccgaacccgcactaacatttatagttcccgttccgcttacattgccgggaataaaggttccgtcagctgaaattgttcccaaattctcatcactgacgctccagctatacgcttcgtctgaatctgtcaagttaatattctgatataccgagtcagctgttaaataaactgtctgccctgatgaaactgacaaagacgacacttcactgccatctgattcatttttaataacaatactgtcagggtttgaaactgaatgaagcatagtactgccatacgcctctcctgtaactgctgaaaaataaacatccccatcgccgtacaatgttgcataaccgtcattgtttataacggcctgccccacagttgtattatccgactcaacagaataataaattggctcggttatttcagcttttccgtaagatttgtcaatcgccgctacccaaactcctacactgctgcccgacaatacatattctccatatggatatgtcagcagtttataaggtataccgtccggcggattcatcttctttaaaaatataaagttagcgcatctccgtaatccttcagacggagaatttaaaatcttaaactcagtggtttcaggcaaagtccctccaagctgagtgcttcctccgccgtccaaatttactgcgtcaacacatccaagttccaaaagtctgcgtgccaaagtttcttttctgactccatagctataccccggctgcctgccgtctatagtataaaatattatcgagccatccgcctttattcctacagcgcttctcggcgccgcgctgtcgtcctcataatccagctgtccgttccgaagcaatgttcctcccagacagcctgtcccgtataccgcactattccaacgagcgtcacctgtcacttcatttgcaccaacagtaattgtctgacctatatatagctgattcaaacggtctttcacctcatccgcaaccctgtcatcaacacttattaccaattttccgtcaggtattgccactgaaccgttatccgaagtgatggactcgacggttgccgtaaaaggctgtcccagcgaaaacccgccgctaacatttcccaagacaacattggtaccgctgccttccgcattggtgtaatctccgaattcatccgtataaatatacataacatacggctgacggtatttatttaaacattcaatatcaaacagcgtgccttccggtgtttcaacagatatataaatttgcagaggcgaaataaagcctgtgccgtccgcattaaaacccactcctgtcagcttttcctggtcagacgtcagaacctttccgtccacaattgtatcactcataggcacgccggtttggaaagagaaaaaatcagcgttcatacccatagccgcaaaaattccctgctcatttaaatattcattagcttcaacagaagtacgttttccaaaaacctggtctccattagaaactataggcagaacatcgctgtttggtatgtattcaaaataattttcagtctgctgtccaacactgtcgctctgaaaggtattcctattataagtggttccctgggcgtactcagtttcagtatgagttgtttgctctcccagcacagacgcaaaagcagacattgaagaaaaaatcaacattccagcagttatacaggacatcaacttaaccgcaaacctgtttttctttatatgtaaaccgggtttttgtaaataattccccatttattatcaatcctttatatttattattgttcacgcagggctaattatagcataacaccgcattgttttcaaggtgcaatttaaataattcagaaagcaaatcccagcaatatactaggtcttttttcttttaaatactaacaataaacattttttgttcatgtaatgtatattttaatccctatagcacaaacttaaattagaataagaaaggagtgttaaaaatgtttaaacatgaaaaaatacttttccacccggtcagcgttgagaaaccaaatccgcagtatgcagcgcttttgcaggaacagctgggcggagcaaacggcgagctcaaagccgctttgcagtatatgtctcaaagtttcagaataaaagacccggaaatcaaagatttgtttcttgatatagcagctgaagaactggggcatatggaaatggtagcgaccacaataaacatgcttaacggacatgacgtagattatgaaaaagtagaggcaggagaaatacagtcacacgttcttttgggtctcaatcccggacttataaacgcctccggatattcatggacaggcgattatgtaacagtaaccggcgacctgtgtgctgacttactatcaaatatagcgtcagaacagcgtgcaaaagtcgtttatgaatatctttaccgtcagatagatgacaaatgcgttaaagagaccatagactttcttctaaaccgtgaggaagctcacaacacaatgtttaaaaaggcatttaacaaagtgcaaaacaccggttcaaaccgtgactttggaactactaaggcggctaaaatgtatttcagtatgtctgagccgtctccggaagacaaccaattcaccaatgtaggtgagcctcttaactcattcagttaataaaatctaaaaaataaaagagtcctttcggactctttttatatatgtctgtctaaaacgccaagtttgctttgcctgtattcggaaaactttccattatccagagcagaacggatttctgccatcagattattataaaaataaaggttatgaataaccgccagtctcatggcaagcatttcatttgccttgaaaagatgcctgaaatatgctcttgaaaaattcctgcatgtgtgacaaccgcagttagggtcaacgggtctgtcgtctctctcatatttagcgtttcttatgttcaggattccctcagatgtaaatatagtgccgtgacgggcgtttctgctcggcataacgcagtcaaagaagtcaacgccccggtaaaccgcctcaattatatttatgggagttcctacccccataagatatctaggcttttcctcgggcatatatggttcaaccgcttcaataatattatacatgtcctctgtggattccccgactgccagtccgccgattgcgtagccgtttaaatccaaatcaactatttgtttcatatgctcaattcttatatcgcggtaggtactgccctggttgataccaaacagcatttggtttttatttatagtgttatccaaactgtttaaccttgccaactcatctttacaccttttcagccagcgaactgtcatatcagcagaatcctgagcatactgcctttcgcacggattttcaacgcattcatcaaaagccatcgctatagttgacgccaggttggactgtatacgcatactctcctcggggcccataaaaattttatgtccgtcaatatgagatgaaaaataaacgccctcttcttttatattcctgagttttgctaaagagaaaacttgaaatccgccgctgtcggtaagtatcggtctgtcccaattcataaacttatgaagtccgcccatgtcgcgtataacttcgtcgcccggacgaagatgcagatggtaagtgtttgaaagctctacctgacagccaatatcctttaaatcaaaagtatcaagcgcgccttttattgccgcagcagtgccaacattcataaacacaggggtctgaatagttccgtgaacagtcttgaattccccccgtctcgctcttccatgctttgatatcaatctatacatatatctactttctcccggttaaaattttacttgagcagcattgcgtcgccaaaactgaagaatctatacttttctttaacagcctgctcgtatgcctcaaatatattttctttccctgcaaacgccgataccagcattaacaatgttgattccggcaaatgaaaattagttattatagaatcagtcaccttaaacttatatcccggatatataaaaatgctggtgtctcctatctcagctttcattgttccgttatcttcggcaacagtctcaagagttctcacagacgttgttccaacagcgataattctgccgccgctctttcttgtttcatttattatatctgccgcttcctgcgaaacctcataatgttcagtgtgcataacgtgttcctcaacattttcaaccgaaaccggtctgaaagttcccaaaccaacgtgcagggttaaataagcggttttaacgcccttatcttttatatcttcaagaagttcgttggtaaaatgcaaacccgcagtaggagcggcggcagaaccttcaattttagaataaacagtctgataccgttctttatcttctagcttttcttttatatacggcggcagcggcatttctcccagcttatccaagagttcttcccaaactccgtcgtattcaaaccttacaattctatttccgtcaggtcttacctcaatcacttcagcctttaacagcccgtctccaaacacgaatcttgctccggttcttgccctttttccgggttttaaaataacgttccaagtgtttaaatctatcctctttagaagaagaaactctattttaccgccggtatcttctttcacgccgtacagtcttgccggtataactcttgtgttattcataacaagacagtcgcccggattcaaatactcgattatattcctaaaatttttatgttctatttttcctgtttctttgtctaagacaagcagcctggaacctgccctatccttcagcggatgctgagcaataagctcaggcggcaaatcgtaataaaaatccttagttgtcatatttaactcaacttactccaatcctatattaatatactgttgtaacttcagcgccgctgaaataatgggtcagtatctcatcatatgtatacccggcttcagccataccttttgctccatactggctcataccgacaccatgtccccagcctgagcctttaaacgtaaacgaagtattagcgcttgattcttcataagaatcagcatataccttttgatactgtccgttagttgtataaagagattcgcccgaaaactcactcctgccggaacttgtaagcagttcaagctgtgtcggacgtcttctgataagtgttgaaccgtctgtcacagaaacataagcctgcccctgagcgtctccgtcacccaccacagtaaacatttggctcttggttacagtgccgaacactgtgcggcactcttccaattccaatgtttttattgcagtattgccggtaactctcatcttaatcacccggccttcaggtgaatattcaagcacctctattttctgcacatcgcccacatcatatcctctgttacgcattatagtagatacttcagcaactgtcaatacgccggaccaaataccattcggaatattttcagtatcttcataactattgtcaacgcttataagatatggaacctcgttgccccaaacatacttaacattttcggtggtagaacccattgacgccgcatagtagcactcgcaaagctctccgttatatgtcataacctgtcctgccgtagcgtccacagcgtcatatatagactgcgcttctcttgacataccggtatacatttggcaatgcgtgttcgcacaaatatcaaacccatatgaagaatgcttgcctaaattctgagcggcgtaattcctggagcacaccgcctgggcttttaaagcctcaagaggccatgattcgctcatttcccttgatacaacaccatataaatactgatccatattgaccacattaatcacagctattcctgaaccgtccttaataaaattcaggcttccgcgatatcccgaaccatcaatttccagtctctcttcccaaaaatcggtataaatcgggcatatacctataccattattaccggattcagaatataatacattaccgtccaaatcagataacacaacctgattttcagcaatgctgactataacatcggtatcctctataattttctcctcagaaaaatctctgtcattaaatactcctgcataatatccccgttcacttgtgattttcacagacgttttagccgacgagccgtaaaacagcccgactttaatatttgacggcacataaacatcagcagacacaaaagtcttatatcctgcaagtgtgcaaaaaaacacagccaaaacagtgaaaacagagaacaatctaaaaccttgccgcttaaaaaacatgaaattatccacaatgtgtcacctcgcttaaaaatatctctgtcagtacagctaaacgcaaacaaatttgaacgtttgctgcatgcctgatattataacacataattctacaaaaagccatatatatctttattatcttttgttaaatttaatttacgtataatacaaaaaagcatttgacataattgtaatattgtcatataattatgtataccaatgaattcaaggaggatttaaaattgaaacagtataatgttggaattatcggagccacgggcatggttgggcagagatttataacgctgcttgataagcatccctggtttaatataaagcttttagcggcttcaccgagaagcgcagggaaaaaatattctgaagcggtaggcgaccgctgggtcatgaaaactgacattcctgactatgtgtctgaaatggttgtttatgatgctgctaacgacatagaaaaaataaccggtcaggttgattttgtattctgtgcagtcgatatgaaaaaagacgaaataaaagctttggaagaagcctatgctaaggctgaatgcccggtagtttctaacaactctgctaacagacatacgccggacgtacctatgattgttccggaaatcaaccctgagcacgctgaaatcatagaagctcaaagaaaacgtctcggaaccaaaagaggctttatttctgtaaagtcaaactgctcgcttcaaagctatgttccggcgcttcaccctcttatgaaatatggaatagaatctgttcttgcctgcacatatcaggctatttcaggcgctgggaaaacgttcgaaagatggccggaaatggtagataacgttataccgtatataggcggtgaagaagaaaaaagcgaagttgaaccgcttaagatttggggaaagatagacggagacaaaattgttgaagccagctctccggctattacaacgcaatgtctcagagttgcagcaagcgacggccatatggcagctgtttttgtaaagtttaaaaataaaccaactatagagcaaatcaaagaggactggaaaaacttctcaggcgtgccccaggaacttgagcttccttcagcgccgaaacagtttttaaactattttgaagaacctgaccgtccgcagacaaaactcgacagaaacttagagggcggaatggctgtttctatgggaagactccgcgaagatactcagtatgattataaatttgtttgcctgtcacataatacattaagaggagctgcaggcggcgctgtattaatggcggaactgctggcctcaaaaggatattttgattaattaattttttgaaagaaaggaacttctgttatgaaagagcctatttttaccggaagcgctgttgccatagtcacaccgtttactgaaaccggagttgattttgacaagcttgaagaacttatagaatttcatatcgcaaatcagaccgattgtattgttatttgcggaacaaccggcgaatcttcaactatgccggacgaagaacataagtctgtaataaaattcactgctgaaaaagttaacaaaaggattccggtaatcgccggaaccggcagcaacgatacagcccatgcaatagaactgagcaagtatgctgaaagcgtaggggcagacggactgcttatagttaccccgtattataataaaacaactcaaaaaggtttataccttcacaccaaagcaattgcggacagtgttaatatcccgatagtgctttataatatcccgggcagaaccggcggactttcattctccctggacacattaaaagaacttgcaaaaattccaaatataaacgctataaaagaagccacaggcaatctttcatttgtagcaaatattgcggcggaaactgacctaaatatatattcaggaaatgacgatattattgttcctgttatgtctttgggcggtaaaggagttatttcagtcgttgccaatatattgccgaaagaaacgcatgatatttgcaaactttacgaaaccggagagactgaaaaatcaaaggaactgtttttgagtttaataaagcttattaatacactatttattgaagttaaccctatacctgtcaaaactgctatgaattgtttaggatataaggttggtcctctaagaatgccgctctgtgatatgtcggataagaatttagagactctgaaaaatgttttaaaagaaaataatgtaaagtgtttgctttaatatactaaaacagaaagacagtgatacaaatgacaaatatactactaagcggcgctaacggaaacatgggacgcgctgttaccagaacagtggaaaataatgacaaagtcaaaatcacagcaggatacgacataaacacggttaaaaactctgactttcctgtctacgataatttagatgaagtcaaagaaccctttgacgttataattgacttttctcatccgtctgtatttgacagcatacttgaattctcggttaagacaaaaactcctgctgttatttgcacaacgggactttcaggagagcagatttcaaaaatgaaggcggcttctaaaaaagcgcctatctttttctcagcaaatatgtctctcggcgtaaatcttttaattgacttggtatgcaaagcggcgaagctgcttgacggaagctttgatattgaaataattgaaaagcaccataaccaaaagcttgacgcgccaagcggaaccgcgctcgcaattgctgacgctatttctgacgcagtaagttttgacaccgagtatatttatgacagacataatgtacgtaaaaagcgtgataaatctgaaataggtatacacgctgtccgcggcggcaccattgttggcgaacatgatgttatatttgccggcaatgatgaaataatagaaataaaacacagcgcttcatcaaaagaagtttttgctgtcggcgctgtaaaagccgcagttttcatgaaaggaaagccctgcggtatgtatgatatgaaagatttgattgagcagtcttagtttgaatgtataaaccacattttatatattggaggttatcacatgattaaaaccatcaccgatattgagttttttccggaggttgccattgttacattaaataatattccaaacactccgagcagtattgcaaacattctcagcgttattgcagagaacggcataagcatagatatgattagtcaaaccgaaccatacaaagataagataaacttatcatttacactttctcaggatgatttgagcgaggttatcgggcttacaggaaagtttaagtctcttgccccgtctattaaagccgacataaacggaaacaacactaaaatcctgctgagcggtgatggtatgaggtctgagtcaggcgtagcagctgaactgttttcgctgtttgccaaagaaaatatccgcgttaagcttataacaacagctgagacggaaatctcatgtcttatagatataaaagatgttgaagctgctaaaaagattcttttataataacttaaatatttaaagaatcagtatttgaagtgacttttaaagattaaacaaaaacaatattaaataaaaagagttcggaattataccggactctttttatttaaaaagtccattatttgaattcttaaccggtcattaatagaatttattcaaatacaatttgtaaagccatacatgtttgccatacaaaaataataaattaattatattttgattttgcagcttcagaactgttattaaatatttttacatcaatgacattatggtttgagtatcctcacttttattgtaaatagaactcagtataatattttataaatctgagtttcccggaatttcctataatatatttataaaaataattgaatttgataaaaatttatgttataatttctgcaattggttttacatcaaaaatttacaaatacataagaaatgttacagattttgaggtgcctgcttatgaaaaaaacatttaacaaaatattatattcggctgttcttacatgcctgctgatgattgtttttcaaacagtatgttttgcagaaggcggctcgtcttataatggatacatagtaaaattcaaatcagcccccgtaatgctggctgaagaaagtgacggcaatcagctctctcctatagtaaaagatgagaatatatatacagtcacaaatgaatccgaagagtttatagacagcctgagccaagaccaaaacgttgagtatatagagccaaattatataatctcgctgccttataacgaggaaataactgaaatgaacgttatttctgaaactaataattcaaatatggcagttttaaacagtatcggttcattcactcagccaaatgacacatactattataaccaatggaatatgaatatgataaatgcttcatactggtggcaatatggattggatacaaaaaacgttaaaatcggattaatcgacagcggttcccctgacaggcatcctgacataactcaaaatattgcgcccggagttgactacactggaactgggatttatgatacatatgggcactcaacgtttatatcgggaatattagcctctgacacaaataaccgtatgggcacagcgggtattcttccaagttccactgttatacccttcaaagtgtttacagagaaaaaaactgacagcgctatagttctcaaagccttttatgatgctgtggatgtttacgaatgcgatgtaataaacttaagcctgacatttgacagctatatagaatcttttaaatatgctattgaacatgccgtgtcaaaaaatatcatagtagttgctgcggtcggaaatgacggaaataaagaaacggagatagctactaaaataaaatatcctgccggctatgataatgtaatcggagttggttcacttacatattccaaaaagagggcttcacacagccaatataacacttctgtagatgttatggctcccggtgaaagtatttacagcagttctttaactaaagacggtaaaaacaatctgatacattcctattcccgcggtaccggcacatcatacgctacacctcatgtgactgcggccgcagcaatagcaaaatattttaataaggatattacccccgcagaatttcttgaattaatagctgaaacttcagaccatctaggcgacgacggcaagaatcctgaatatggatacggagctctcaatatacaaaatataattgaaactttaagtccaagttttgccccggctcctacctctgcccctgtaagctcacccgaattgcacaccgaaatatatcctttggtatttgacgctgatttaaattcattaaagagttctattcagctttataatgataccgataaaaataaatttgtagactgctatgtagtttcatacacggaatccagcgacgctgatggtgaattggttgaacatgtgacaggttcaatagttaaaaacgacgttgaaattccggcaagcggtcataagactcttccatcgcttgttctgcctgtagataagacaggtttgcgctcattaataagggtatttatatgggacgataacatgcagccgctgatggctccttatgaatatgaagtaaaatattaatatttaatacgtttgtccaaaattccattatttgacattaaaaatctgaataaaatacaatcacctctaatactatctatatatgaggtgattttttatgtttgttgtcagactgaagacgctggtatttttttcagttatatttattatttcagttgtagtcggaatagtgggattctcatctttgaaaaataatgattcacaatttggtttcgccgaaagtttttctgaagatgaccgcacatcagttgaactgcctataattatgtaccatggattgaccaagaacccatctaaagtaaacgcttacgttattcctatctcttcatttgaagaagatttaaaatatttgaaagaaaacggatacactactgttttgatggaagatgttataaattacgtcgacgggaatgaagctttgcctgaaaagccaatagttttaacttttgacgatgggtttgaaaataatttagaatacggtcttcctcttcttgaaaaatatgatatgaaggcggtcgtttcaatcgtcggtcaatatgctgaaaagttttccagtattgacgacagcaatcctgaatatgcgtatcttacctgggacaatataaaagagcttgtggacaacgacaggcttgaaataggcaatcacagctataatatgcacatgcttccgggtgataaaaacaataaagacaacagaaaaggcgtggggcaaaaaaacggcgagtctgacgaaacatacagggaaaaatttatagccgacacagaaaaaaaccaacagctgctaaaagataactgcgacatcacaccagtgacatatgcttatccatacggtgagatgtgcaaaaattccgaggcgatattaaaagagctgggatacagagccactcttagctgtcttcaaaaagataactatataacacaaggtaacccggattcattatattgtttatccagatatttgagaagcaatactaaatcgattgctcagttattacaaaaataaaatgaaatagtattctaatcattgattgaaacggaagacagctttattgatttaaggtaaatgctacatttcttaaaatcattggatttagtagatatattgtaatttatactttcctataaaaaattcaaataattttaaacttattaattaaaaagggttcaatcgaaccctttttaatttgacatcaacgcatttattaaatatcaattctatattatttttttaaaccgttttaatttttaataaaaacctacaattttcacaattattacctgcagtgttttatattttctctcttttcaacttttttactgtcgtttacaataattttcacaatatcggtttctttgctataataacatcacattatcacaactgttgattactgtaaatttccactaaatttttttattttccaaaataagtttaacaatttttctgatattatcgtgctaagtctctcggggcctttttacttttcattaattttatatctgttggcagaaacgtttctcaaaatcttttttgattatagacaacgtttagatgttgcttataactaaaaattacagagacagtttcgtaataattttctacataacaaaaaacggttccgcccatattattagacgaaaccgaatcatgctaaatagcaaatacttttttaaaaattttcataatataatcattgctaaatattattttaacacgtatttttaagccgcatatcccaaaactacccgttctattccggctaaatcaggaataatatctatattcctatatcccgccttaaacattaaaccggcgacgtcaccggcttgacctataccaacttcaaacgctgtcattccgccttttttaggaaccgcttttttaattataatacggtaaaaatcaagaccgtcatctccgccgtctaatgcggcaacaggctcgtattctataacctcctgctgaagctcaagtaaatcatccgtcttaatatacggcggatttgaaactatcacatcaaattttggctctaaatccgaaattccatcacaaatatcacggcagacaaaattcatttgctttgtcaccaaatttttttcagcattcagctcagcaactttaagcgcctcttctgatatatcaagttctgtcacaacggagtttggcaaatatcttgccatactgattccaacacatccgctgccgcttcctatatccaaaatcctgatttgctcagatacgttcttatatctctcaatcactgtttctactaaaatctctgtatcctgtctcggtatcaaaacatttttgttaacgataaaatcaagggacataaactcagtttttccaactatatactgcaccggcatacctgccagtctgcggttcaaatacgcgttcacctctatagccagcgcgtccggcacagatatatccttagttaataattcatccttttttaaatccaaaacgaacataattatcaaatccgcatcaagctcgggagatgatatattgggttgttcttttaatctattatgcgcgtttctgcgcaattcctttaatgtcataaaatcaccttctgcctaactatgtgagtcagcctttaccacacatccgcagtcttatcctccggtatcacagctttcagcgaccttatagcaacctctatctggtcatcctctggctcattggtagttataagctgaaaccacatcccaggagcgcttatagcgcgggtaaaccaattgtcatgccgtcccgcaaactttataatttcataagaaattcctgctactatcgggagtaaaagcagtcttaatataagtctccaaattgcccacggcatagctgaaaacattacgccaatcacagggatatgagtaaagctttcctgctgccacggtataatcgaaaacaccaatatacttatcaccataactatcagcaaaaagctggtaccgcagcgcgggtgcagtcttgattgaatacgaacattctcaactgtcagcggcagtccgctttcatagcaaaatatagatttatgttctgcaccatgatacataaacacacgttttatatctttcatctgtgcaaccaatgataagtaaactataaaaatagcaattcttacaataccctctataagggtcaaaaccgtattattatgcacctgcataaaatcagtcaaaaatccagctatcaatgtcggcagcaaaataaacaaaccgattgataaaaacatggaaaagataacagaacaatagattataacattcattgctttttctgaatccagctttttctccagccaggcctcaaactttcccggctcctgctcgacttcgtttccatcgtcatccacgtcaaaaaacttagccgaaaacataagtgattttacgccgacaatcattgagtcaaaaaagttaacgcacccacggataataggcagttttacaaacttgctttttctgccttttccaagaggctgttcatcaacaactatttctccgtcaggcttccttaccgcagtagcaattttttcgggacctctcatcataactccctcaatcacagcctgtccgcctatagacgtcttttttgctataccgcataaattttgaacgctgtcagtcttattctgatcgacctcatctaaaactccgctcatttgcgaagattcaatctcatttttattatcatcagataaattcatatacacaccatctctttctaactctatcaccaaacaaaataataatatcacattaataacaaaatttcaatgaacatactgttaacaatcaatgtcccaacggtttttcactaagcaaatcatgctcgcaggttaagtcggcatgaagcaggtcccaaaatacgattagcaagattattgtggctccccatatggctttgcctaagaataatctgcataaaacagtagaaattataccaaaaagcacaaaggttcctaacatacacaaatgcttaacacttctgcccaaactatccgactttcccttcctcagccatttgacaaaatttataccaacctgtcttaaatgattggtacagaaagttgtcgacataggcgttccctccgcctgcctaaacgtattatactgcatagaacagataaagtttacagctacctgcgttatctgatatggagcggtttcaggaagcagaccaagcataaatgttactaaaacctctatacctacaagcagagtatcccagcgaaccaaaccaaactttttaacatgaatcggcagcgcctctgagagcacggctcctaaaaaatatgcagaaataggtatcagcaaatatgccgcgccgctcaagtcccagttaccgatcgccatagccagcagtacaaaattagccgtttgagcattgcagaacactccgccgcggattgagtaagtatacgcccccaggaaacctccaacgcccattagaccaataaatataatcaatctctcacattctaaaaaccttttttgacctttatttatcataatctctaatacagcctctttctatactttttctgctgttcatccggacgtttcctcggcattcttgatacaaacgcactccggctttcaggcacagtttgatattcgccgcagtttctatcagacgctgagtttgtaccggtttcactttccctgctttgacctgtaaacctgattctctgcatcattttcatctgcattccctgctttttcagcgcctctatggctctttccaaattgttctcagaacgtttcaacttatccttttgtgagagcataacaagcataaatacaaaacaaagaaccgcaataataattagtcccaaaacaagtattttattttcattttgaaccgtctctaatattttagtatactgatttctcaaactgtttgaatactgttcatatgactgttcaattccgcccgatacggcagaactttgtatcactacactgcccggagcctcaagctcagcgtcaggagtatcagaaagctgaacgtttattccgttgttttccaaaaacgtcacaactgaactcatgggtatcgccagagatatacggtcagcgtcttcaaccttcatattattgacaccgataacctgacctttttgattgagcaaaggaccaccgctgtttccgggatttatagccgcgtctgtctgaatataatgcactccgtttaactgcctgtctgttgttgataagatacctcggcttaccgtaaatcccattccctgcggagagcctacagcgtatacgtcggtgcccaaagacggaatatcctcagtcataggtattgtcggaagattgccgcccaaaacctctatcaggctcaagtctttagcctcatcagaagctataagccggccgttatacaaacctccgtcccttgtctcgattgtataagttgttgtagtactcacaacatgctggtttgtcactatcttatcctttgagatagcaaaccctgttccaactgaattcatagagtgaacaaccaccacagaatcgcatatctcatccatatcaaactctatcgcgtatccgcaaataggaaaacaagcgagcaaaaccaaaaataacaatactgccgttccgattttcttcataaaataacctcatttttctgttccgctgacccttatacttacttcaccgctgtccaaaatcctgctttcgccgctgtacagctttagaaccaaagcaccgctttcgtttatatcctgaactaatgcaaactctcccgtgtttaatatttttattctttcaccaagtaccatagaacgacttttataatcttcaatataatctttgattatacaatcaccgtcgtcacaacggacaaaatccaacatctgattaataatttcggcggcaatcacatttctgtcaatgtccgtgcagtcctcagaatcagacaaggctcctgcaactttggcgagctcctcaggaaatccgccgccaaacacattaactcctatgccaataatcacgctgtctaccatacctgtctcaaggtcggtcagcgcttcggtcaatatgccgcatatttttttgccattaaaaaacacatcatttacccattttatctgaggtttcagcccagtggatttttctatagccttcgataccgcaaccgatgtgacagttgtaagccgtacggcgtctacagcctttatctgagggtgaaacaggaagcttatatatatgcctgatccaggaggcgaataaaaacttctgccccgtctcccttttcctccgctctgctcctcagaaataaatatacgcacatcagtagttttatcatttaaagcatatgctttagctacgttattagtcgagctgaccaatcggtgaatttctatactatcagcaatcttaggattatttaagtgtttttttatttcaattaccgacagcacattgcttttattcaaaatataacctgagttcctttttgcggatatattatatccctcttctttaagagcggtcacagctttccaaaccgcatttcttgatatgcccaaattttccgccaaacgttcccctgatacgggcgtttctccggaatttaaaagtatttcaagaacctctgcttttgtatttcttttttccaaaattttcaccttagttcatatagatagattttacatttatgacttatttacaagcttcacgttatcttcgccgagcatatttttaagtattcttatcttttcgctttcaggactcaccttcatactgtccggcgcctttaacgtcttttttgtatcttcaaaatatattataacttcaatattgccgcccgtgcctgacagtatatttttaacatcaccaagagcttgtctgtcgtttgattttaattttatatataacttgctttcactgtattttctctctttcaaattttccgccggaagcagtctttcaatactctgaaccctgactttaggcgccgagtcttcacttatatccaaatctcctctgacaataattttactgtccttatccaacatgtcgtcatacttttgcaccagggccggaaaaaccaaacattcaatacttcctgtcaaatcctcaataacaatatacttcattatatcattccgttttgtccgcctaaccctgacgcttgttataataccaaacactgcggtctgacttccgggaagaaatttatgctcttcatcctccaaaatatttaatattggcgatactctgccgctgaactgaaactctctgtattcgtcaagaggatgcccggacacatacatgccgatactctccttttccatggctagcagctgttctataggcagttcaggtctatcctcaaaattatctgcctcaacagtttcttcctgcccgttttcttcgctttctatatcaaacagacttatctgaccgggaagctcattctttgcagacgccgccagcttgtctatcagtgtctcatattcatataacaaaacgcttctttttatcttcaaactgtcaaaggctccgctttgtataagattctcaaccactcttttattcagcttcttccctgacattctgcggcaaaaatcagtgaaagagccaaactctccgttcattagccgctctgactctatagcagccacaaccccatcgccaacgttttttattgctcccaaaccaaaaactatatttccgttgacaacggtaaattttcttccgcttttgtttatatccggaggaattatatcaagaccgttcttttttgctatcagtatatatttagctattctgtcgccgctgtcaataaacgaattcataagggctgcaaaaaattcagccggataatgacatttcagccaggcggtctgatatgccacaaccgcatacgccgcggcgtgggatttattaaaagcatatgacgcaaaatccatcatctcatcaaagatagaaaccgccgtctcctcatctattccacgctttatagctccgtccaccttgctttcaccgtcatcaatcccataaacgaagttatgcttctcctcagccataacatcagcttttttcttagacatagcccgtcgaaccaaatccgctctgcccagcgaatatccgccaagctccctaacaatctgcataacctgttcctgatatactatacagccataagttacgtttagtataggctcaagcattggatgtttatatgtgacactgccatgattgtttttattagcgacataccgcggaatagactccataggtcccggacggtaaagagaaatcccggctataatatcctcaagatttgtaggtttaagttcggtcataaaccgcttcattcctgtgctttcaagctggaacaccccatcgctgtcaccttttgaaatcattttatagacctcttcgtcgtccagcggaacagagttcatatccagctttatcccatatgatttttcagccatatcagccgcgtcacgtattacagtcaacgtcctgagacccaaaaaatccattttcagcagtcccagtctctcaatggttgtcatcgtaaactgtgttgttataacatcttcatttttttgaagcggaacataattatacaccggctcctttgtaataaccacgccagccgcatgggtggacgcatgtctcggcagaccctcaagcgcctttgcagtgtcgataagcttttttatattttcatcgctgtcatacatctgctttagctttggatttaagataagcgcctttttcaaggtcatatgcagttcaaacggtatttgcttagcaacgctgtccacggacgcatacgacatattcagcgcgcgcccaacatctctgatagcctgtcttgccgccaaagttccgaaagttattatctgacacaccctgtcgcttccgtacttgcggttgacatagtcaatcacttcctgtctccgctcatagcagaagtcaatatcaatatccggcatactgaccctttcgggattcaaaaaccgttcaaaaatcaaatcatatttaatcgggtcaacgttagttatttcaagacagtaagccacaacgcttcctgcggcgcttcctcttccggggcctaccattatatcattgtccctggcatattttataaaatcccaaactatcagaaaataatctacatagcccattgttttaatagtctcaagttcatattcaagccgtctgtatacctgactgtctctatctgctgcctcttttggataccttttcttatatccgtccatacataattttgttaaatattcatatgctgtataaccctcgggcacatcaaactcgggtaaatgcagttttccaaactctatctccacattgcatctctcagcaatttcagcagtgttttgtattgctttaggaatgtatgaaaacagttcgttcatctcatcctctgacttaacataaagttcagaagtagacatcttcatccgtttatcatcatcgactgtttttcccatctgaacgcacattaacacgtcctgatactcggcgtcttcttttttcacataatgaatatcattagtgcagactatgtcaagctccagttctccggcaagttttatcaaaccgacattaagttttttctgatcataaagaccatggtcctgaacctcaacaaaaaatctatctctgccaaaaatatcaataaactctttcgctgtctctatagccgcgccataattgccggcaagaatctttctcgaaagcactccaaacatacagccgctaagagctataattccctcactgtactctctcagcagctccatatctattctaggcttataataaaatccatctataaaacccatagacacaattttcatcaaatttttataaccggtgttactttcggcaagcaaaataagatgataccgctccgaatcaagctcatatgttttgtcaaacctagttctggcggcaacataaacctcacagcccaaaataggctttaccccaattttttttgcatactcgtaaaactcaataacaccatacatatttccatggtcagttattgccattgcttcctgtccaagctctttagctcggtcaagcaccttttcaaccgtgccttctccgtccaaaaggctgtaggcagtatgcgtatgcaaatgcacaaaaccatttacttccgccatattcatcacccttattgtcaaccgttaattactgtcaagtataacattttagtatttcaatgtcaataatattgcggctgttaaaccgcctgattatacgaccggtacgcaagccgtttaaggcttattgatgaaaattgtcggattgttaaaaaaattgcgaattcatattgacgatttaaatttttagttatataatgtaatagttaattatttagttaagttttacttagaatagatgttgaggtttataaatataattatatggtgaaacctatgaccaaataataatttatgaaatattaatataaaaataataaaagaatatatatattgtggaggagaaaaaaatgagtagagtttacaacttttcagcaggcccgtcaatgcttccgctggatgtgctgaaaaaagcccaggaagaaatgcttgatatggggggaagcggtcagtccgttatggagatgagccaccgcagcagcgaatatcaagctatcattgacaaagcagaagctactttccgtgaaatcatgaatatacctgacaattacaaagtattgttcttacagggcggcgcgtcaacgcagttcgccatggttcctatgaatctcggaaacaagtctaaggtcgctgattatgtgacaaccggacagtgggcaaagaaagcgctggctgaagcaaaacgctatattacagccaatgaaattgcttcaagcgctgacaagacattttcttacctgccggatgttgacaaaagtatgcttactcccggcgcggattacgtacatataacttataataacactatttacggcacccactataacacgcttcccgactttggagacgccacaatcgttactgatatgtcttcatgtattttatctgaagaagttgactttaacaagtttggtcttgtgtatgcgggagctcagaaaaacatgggtccggccggtgttaccgttgttgtcgtacgtgacgacttaatcggaaacgctatggacatcactcctacaatgcttaattatgaaacacacgctaaaaacggctctatgtttaacactccgccgacatatgctatttatatttgcggtctggtatatgagtggataaaagacatgggcggcgttaaggttatgcacgaaaagaatgttgaaaaggcaaagattctttatgacttccttgacaactcaaagatgttcagaggtactgttgttcctaaagaccgttctttgatgaatgttccgtttgttactgattctgatgagcttaatgcaaaatttgtttcagaatcaaaggcacagggcttcgttaatcttaaaggtcacagaacagttggcggcatgagagccagcatatataacgcaatgcctatcgaaggcgttaaggcattggtcgactttatgactaagtttgaaaaggagaattcataatgtataaaattaaaacattaaacaaaatctcaaaaaagggtctcggaatccttggaaagaattatgaaatttctgacgactgtgaaaatcctgacggtatcatcttaagaagttttaagatgcacgatatggagcttccggaaagcctgagggctgttgccagagccggcgccggagttaataatatccctcttgataagtgcagcgaaaagggtattgttgttttcaacactcccggagctaacgcaaacgctgttaaagagcttgttatctgctcgctcctcctgtcctcaagaaaagttgttcagggtatcaactgggcaaagacattaaaagatgaaggagatcaagccgcttctttggttgagaaaggcaagtcaaactttgtcggccctgaaatttacggaaaaactctcggagttgtgggtctcggcgcaatcggcgttaaggttgcaaacgcagctcatcacctgggaatgaatgttgtgggctacgacccttatctctcggttgactcagcatggcaccttactagatttgctgaaaaggcaaccagctttgacgaccttttggctcagtcggattatattactatccacgttccggctttgccgtcaacaattggcatgtttaattccgaggcttttgcaaaaatgaaaaagggcgcaagactgcttaatttctcacgtgacaccttggttgatacaaccgatattcaggcggctttagaggacggaactgtttcatgttacgtaacagactttgctacggccgaccttctcaataacgacaaggttatctgcatgccgcatctcggcgcttctactcctgaaagtgaagaaaattgtgctgttatggcttctaatgagataaaagactttttggaaaacggaaatattaaaaacagcgtaaactatcctaactgtgacatgggcgaaaagaatggcgaacgcatgactgtggctcacagaaacgttcctaatatgctgaagcatattactgacctgattgcagcaaaaggagttaatatagacaccatgctcaacaagagccgcggtgactacgcatatacaatgcttgaccttcagggcaaaattgacccggctatcgcaaaagagattgaagatattgacggggttataaaggttacacttctgtaaaacgcagaatttattcagttaattattgagtataccagatggttgcgcggcctaatcggccgtgaggaaagtccgagctccatagggcagagtgcaagctaacggcttgtggaggcgactctaaggacagtgcaacagaaatataccgcctgtttttaacaggtaagggtggaaaggcgaggtaagagctcacccattgatatggcgacttatcaatgctgtaaaccccactcggagcaacacctgaatcgaaggctaagccggcccggcatcttcggagattggtggctagaggcgtgtggcgacacacgttcgagatagataatcatcattgacagaactcggcttattgtatgctcaattaatttaaaaatcaagactgtggtttataccgcagtcttttttgtatacagcttttaattttgactagcagtaatttatatgttataataattttattattaattataaggtgatgaatatgaaaaaaataatatccgtagttattatattaacaattctattatgcagttgtgttaacgctcctgtttcagcttttgagaagaacggcgacgtctacactacagacatcggagcgctgattgacgagcagccaatcaagtcatacaattatcaggaccatacctatatatgcgcggaagatttgcgcggttacggctttgatgtggattggaacaacgaactcagaactttgagtatcgagaaaaacaacagcattgaccgaacgtcgctgagcaaagatgaaataaacattttaaagtctgatattccgttatacaccaaaattgcagaggtatatccaaccgatataaaaacttatttaagcggcgaacttaccgaagcctgtaatatagacggtaaaactctgatacagctttcggctttaaataaatatggttatgttgaatacgacgacaacagccgtcttgctaaattaaacacagtaaagtatcaattggataatgcttttgaaaccgctgaaaataaaactgaacttgtgttgggaaacggaattacttattacggacaaaccaaaaacggtgttcctcatggtataggaaaaagatttgataagagcgtaatgtctgaatttccgggtacaatttctgacatggaatatttgggctattttactgagggcaccgaaaacggattttattatgaatccggtaccgaggaatacacaatcggaagttatattgctaaagacgaatatattacattcggcaataaggagcttggtgataatttaggattccaacattcatacagcacatatcatttttggcctacagtcaacgattcaaccacttcaaccattgacaggcgcgatggttttattcgttccgctgttattgacagcagctatctgtatggtataaacgtttcagaccttagcgttataaacaacggtgatttaaatgtttcaaaatgcgattatttgcccaagtttgacagattcggaacaaacaattattcagaaatatctgtaatagatgaaaatgataatttatataccgcaccgttttctactgactcatataaaaacgccgtatacagacgaagaaatatacttgacggaaactacagcgaaaactggctgctggctaaagacaacaaactgtatataaaaacatcggatgatgagactgaagacgtgtgcactgttgaaaacgccgtctccgcttcataccaaaattacattgataccgacggaacactttgggaagatgttggatacggatataaaaaaatagacagtgatgtaaaacaattttccagccaaagctatgttatttatctaaaaaatgacggaagcgtttggacatatagaagcgcgcccggtccgggaagcgaatggatagacaaaaaggactactcagctccggtaaagcgtgccgacaatgctatgtcagttgcgactgacgacaacacatactactacataaagcaagacggcagcttatggggattcggcgcaagctacggcggacaactaggatatattgaaacatacagtttcgagacatatgattatttatcatcgatgtccaactacacctctcctgtcaagctgggagatggattcatcaatgtcaaggcagcaaacaatgtctgttatgcgttaaaatctgacggttctctttggggagcaggagaaaatgaatatggtcacattctccccggcagtggtgaaaagaatgtgctcaacatggtcaaaatcgcagataaagttaaagactttgcaggagggagttcgattatatatattataaaaacagacggttctctcttataccgcggcaaaccatactaccggtcaatggtaaatggagaatacacaaatactatattctcagattttacccgatgtgacgctgtatatgaacctgtgcaataaattttgttataattatttgaattagtacatattatttttatattctagtttttaaaaaaatttataaaaatattattgacaaattttataatatatgctatattgtgcttgacaatctgccggaaaggaatatacataaatgtcagacgacgacagtgacagtagtaatttaattaatttaatatgaatatagggcacatccgtattggtataattgatacggttgtgtccttttgtgtttttaagttcttaccggcagaaaatcaaaattttatatgttcaaaataactatattaaaaaaggaggatttaattttgaacagcaatttaacaggacaaatcattttacaagcagtgcttatagccatgaacgccatatttgcctgcgccgagatagcggttatatcaatgagcggcaaccgtttggataaactggccggagacggcgacaagcgtgcgctcagactggcaaggctgacaaaccagccggcacgctttttggccacgatacaagtcgctataacactttcaggatttttaggaagcgcctttgccgccgacaacttttccgatatgcttgtaaacgcaataatgaagttaaacctgcctgtttccgaaaaaacactcgatactatttcggtagtattgattacaataatattatcatttttcacacttgtgtttggcgaacttgttcccaaacgtttggcaatgcgaaaatctgaaagtatagcgctggcgatttccggtttagtatcagtgatttcaaagctgtttgcgcctatagtatggctgcttaccgcgtcaacaaactctatcctgagactgctaggcattgacccgaatgcggaggatgaagaaattacggaagacgaaataagaatgatggcaaacgccggaagtgaaaaaggcgttatagaccatgaagaaaatgaaataatacaaaacctgtttgagtttgacgacatgcacgctgacgaaatagcaactcacagaaccgagctcgatgtgctgtggactaaagacggtattgacaaatggcatgaaacaatcaccggttcggaacattcatattatccgatatgcgataaaaccattgacaatattatagggttattagacgccagaaagtattttatactgaaaaaccctacaaaagatataataatggaaaaagccgtagtaaacgcgtatgctgtacccgaaagtatcagagctgacatacttttgcagaatatgaaaaaaagtcacaattatttcgctgtcgtaaccgatgaattcggcggaacatacggggttataaccataaccgacctgcttgaaaaacttgtgggagatttatatcaagaagatgatgagtttaagcagctcccaagcggtgaggttataattatgggaaagaccgatttagacaagtttgaaaagaaatacaatctcaagctgagttcagactctgctactgttggaggctgggtaactgagcagttagggaggcttccgcaaaacggagattcatttgaatatgaaagtttatcaatcactgtgtcaaaaacagacaataaaaaggttattgaaataaacgtgaagtaagttatattttaatataatgaatatattatatagttattagttttatagaatctgtgacggttattattccgtcacagattttttatttatcatattgttacgctttcagctatgatagtttttataataaagtgtggttttgtaattttatttattaactatagttttttaatatttgctatacagtcctgacatatatacttattttgatattttataagattttcggtctcgtaacatgcgatacagaaattttctgtctttctgattcttatttcttcacctctcataattatagatacttcgtctttttttctaatttgcatttcgtccctcatgtcctggggtattactattcttcctaaagcgacagattaaatctgtattacatataaaactattaatattttatcctaaaatatagaattaatataacacataaattttaaatgtattaaactaacaatgtttactatcataaaaaattttacattaaaatgctattagtgaacttcggcagggcgcatttatgcgccgcgttaggtgagctgccgccgcacgcttgcgtgcacatattttttaactatcttattaaatcaaatgtaatgttagattatattcctatttttcatattttaaagtatagtcaatcatacctgtttatgaactaatagtttaatttatgcaatttttatatttttatcttttaatttattactttttttgttaccgtcattctaaatgacgctttcgctaaaattacaacaaaatagtgtataatacaaataatataaaaaatcaatttttaggagaatatatatgtttgaaaattttataagggaaagaataactgagttgcgaatgagaaaaaatgtatcagaaagatgtatgagtttagatatgggacgttcagaaggatacataaatcatatatcatcaggaaaagctatgccgtcaatgagtgaattttttgaaatatgcagatattttgaaataacgccatatgaattttttaatgaaaatataaagtatcctgaaaaaatacataaaataataaatggaattaataagcttaatgaaaaagatacagaactaataatcagtctaatagaaagttataaagataataacaaattgaaataattattatccttatataactcactcaaaaggaatttgatttaaacattatgattaaaaagctttatatttactatgtatatgaccccatataaaaaattttattattacataataaggtgtttgaaccatttctttttctcgcaagaaaaagaaacgcttcaccaaagaaaaagtgcttgctcgcttaggtcgcctacggctccaaggggcgctcgcccccgctaatttcatcttgaatctgcgcttcaagatgaaaaagccttgttactttcccgttgactttttgaactaccgtgaataaagattttccgagttcttattaatttaactcataaaaaaactggtttttcagtgaacttcggtagggcgcatttatgcgcctcgttaggtgagccaacatctgaacacgtagtgttcaatatataaactaattatttattttctaatctattgataagttttataattattctatatttttttatattcgttttaatttagtacctactttttgctcaaatctatcttaatactaactcggaatatctattttcacggtagtttacaaagtcaacgggaaagttacaaggcttttttcatcatgaagccatgcttcatggtgaaatgagcgggggcgagcgcccattggagccgcaggcgacctaagcgagcaagcactttttctttggtgaagcgtttctttttcttgctagaaaaagaaatggttcaaacaccattattatgtaataataaattttttatatggggtcatatacatagtatataaatagtttttttataagtaaaatgataaatattatattattccgcggcttcgcacctcacacggcagactgcgtctgcattgaatatacatattaacgatattgcaggtaatggcaaaacaatttattatgtataacacacaattaaaaaaagtgtggtcacacctgccgatgttaaataaccactactttttattaaaaaaacatcattacacattggcttcaatgcttatttcttttccggttaagtattcaagaacgcctgactgtgacttgaatccaaacaccagcttatatgcggaaaggctctgatattttcctccgccgtcagattttgccccatattttttatcaccaaccaacggatgcccgtaatgagccagcgttgccctgatttgatgggttctgccgcttagcagctccacttctaaaacagacgcgtttccctcatattttataactctatatttaagcgccgatggtttcgctccgtcaatccgcttctcactgaattttaccctatcgtttccgcactttaatatatatccctcaagttttccgctctcaggcgtaactcttccctccgcccggcagatgtaaaacttcttaatttccctggtcttaatcttttcggttattatcctatgcgcctttaaatttttcgcgcctataactaatcccgaagtatttctgtctatcctatggcagagcgacggaagataagtcccgtttaaatccagctcgccgcgcttatataaatacgcccgaaactcgctttcaagcgaatccgcatcatcgccgctgtcctgagacttcatacctgacggtttgttcattacaactatattttcatcagtatatacaacagagatatttccgttacagcctaaccacttattttcattatctgcgcctttttcaaaaaattcgtcgttaatataaagctccaatacgtctcctccgtcaagctgaacggtaccgtcagttgtccttttgccgtttacctttatcctctttttcctcagagacttataaataatgcccgaaggtgcatcgggcattatcttaaataaaaatttatcaagccttataccgctgtcggctttggatattttaactgttctcatattcttcctctttcgctctgagcgccaaatcttttattacctctcctgcaataatcagacctgcaaccgacggcacaaagctgacgcttcccggaaccggtttattattttcactgtcatacaactgtatttccggcttctttgccttttcctctgaatataccactttcagcgacttaatatcccggcttttaagttcccggcgcatcacttttgccagcggacacatcttagtcgaatatatatccgcaaccttaaaagctgtcgggtcaagtttatttccggctcccatggcgcttattataggaacacccatcctgtcacacctgcatatcagttcaattttggctgatacggtgtctatagcgtcaacaacatagtcatatttatcaagcggatagtcatcggcattctcgggcagataaaacaccttataggcattgacctcagcacaaccgtttatatcaagtatacgctcttttataacatcagccttatattttcccacagtgctgtgaagcgccgctatttgacggtttatattgctcagcgacaccctgtcgctgtcatataaatctatgcttccaacgcctgaacgcgccagcgcctcagctgtgtagcctccaactccgccaactccgaatacggccacttttgaatttttaaggttttcaatcccgtcatatccaagcagcatttcggttctttgcatctcttctctttgaatcctggttccttgaattttggcactttgaatctcggtgctttgcatctcttctgacattatactttctcacatctttcattgcctgataatatctttttaaacttcagtccaaacgccagcgcggtaaacaccacggccaaaaagtctgaaatcggttccgctaaaaatactgcgaacactttcactatattccctccgctttccaaaagaggcggaatattatccggcgtaaatataccggcaaatccgggagttataatattcggcagtataaaaattaacggtataagcagaacgatttttctaagcagtgccaaaaatattgaaactccggcctggtttaatgctataaacgtctgctgacacgctatttgtataccaaaaatacacacagaagctatataaatcctgagcgcccattcagcaaacgtaacaagattcgggtcgttgctgaacattcctaccaggaattgaggggcaaacatacacaccgaccagaataacaatgaaaaaataaacgagaacaaaagcaataagccgaatgctttttcaaccctctttttgttgcctgctccatagttatagctaattataggctgcgcgccctgcgtaagtccctgaagcggcatcatagcgaactgcattgcggttgctagaatagtcatagccccaaccgctatatctccgccgtactgagccaacgagaaattaaaactgactgtcagaatactctcggtaaactgcattataaacggcgacagtcccagcgccagcactgggagcataatttttttatcaaagcccaggcaggatttccttattttcaaaacgctctttttacccgacaagaactttattacccacaccgctgaaacggcctgggaaataactgtagcaatagctgctccgctgacgcccatattgaacccgaaaatgaaaatcggatccagtattatattaataaccgctccgattactattgtcagcattgcctttgtagaaaagccctgtgttgtgataaacacattcattcccataacacattggacaaatatagttccaagcgcataaatcctgatgtaactcattccgtagcttaaagttgtgtcccggtttccgccgaacatcaaaataaaaggctccgcaaaaatcaaggtcagaactgttaatatcaccgctattattaccagcgttgtcaaacagttacccatgattttttcagctgttttattgtctccctgacccatgcttatagcggcgcgaggcgctccgcccattccgaccaaagccgaaaatgccgttatgataactattataggaaatgttacgccaactccggtcagcgctattccgcccacgtcgggaatatgacctatgtacattctgtcaaccacattatacagcatattaattatctgcgctataatagtcggtatcgccattttgagcataagctttcctatactgccggttcccaaatcatgtccgccttttgccggctctgtattttctgtattctcagtgttttcagtagtttcaacagactcagtatattcagtgctctcaatattctcagtgctattttctgtgttttcaatagattcgttatttttattttccattatttcaagtcctatcaattaatttatattcgtcttaaaacatcttttctatgaagcatttcatccaggcgctcaatatagtccttcgcttctttaacgttaaatatccgctctatacggtttgtctcaaggtcaacagttttggtcacaccgccgcagcccaaagagattatagtctgtatctcctccataatataaagattatagagagactcgaacccgggttttgaatacccgacgttttccaggtttccaagctgatttttctgtcggtacatataatacggaaactttcctccctccgccagatactttctggcatatgacaccatttccgcaaccaactcgccttttgccaaatcgtactcgtccaaatactcattcagccttgacgaccgctttatactcattgtatgtaccgtggtatcctcggattccagcttctcaacctcgcttaatgtatacttaaacatttccatatcctcacccggcagacctgcaatgacgtccatgtttatattatcaaatccgcagtgccttgccattttcatagcttcacgtatatcatcggcgctgtgtgccctgccgattattttaagtgtgctgtcattcatagactgtgggtttatgcttatcctgtccacattatacttctttaaaacctttagtttttcttccgttatggtatcaggacgacctgcctcaacagtgaattccttcatttttgaaaggtcacagctgtcatagagacagtctatcatctcttcaagcagctggggcgtaagcgttgtaggagttccgccgccgatatatacggtttcaaccggggttccgttatggcttattatatcagccgtatactttatctcctttttcagcgcctctatatactcaggcataagagccgccgcctgctttgtgccgttggtaacaaaagagcagtaaagacacctgctcgggcaaaatggtatacctatataaatgctcaccccgtctcgatacatatcatcacgtatcggacgcaatgctctcgccgcctctaaggcaagggacgctttttcatatgtggttccgcactcatttataaaataacttattacctcatcatcgctcatgccctcgtcaagaagcttagtgacaattttagccggacgtattcccgtcaatattccccaaggggattttgtttcatctgtaatttctgacataatgtgctcctaatcctatctcaagtatgggtttccgcggcgctcgtctccaactgtagtaggttccccatgtcccggatacagacgaacgctgtcatcaaacggcattatctttgtcttaatcgactgaacctcctggctcatatcccccgtagggaaatcggttctgccaacgctgaatctaaatatggtatcgccgcagaaaacttttccgtctataaccaaacagattccgtctattgtatgaccaggtgtataaataactttaaactcatcttttccaaacggaataatatctccgtcttttaatgcaatatccgccttaaaagtttcttcttttctgccaagctcaccggataggttaacgcgcggctcgccaagaacctcagcgcttttttcatgagcgtaaaccttagcctcaggctcagcttctaataacccggacagtcctcctatatggtcatagtgaccatgggtcaggaatatttttttaagcttgcagccattttcttttattaaattcaaaatagactcatggtcggctgacggatctataaccgccgcctctttgctgtcttcatccaagaaaatataacagtttgttgcaacaggtcctaaaatcaatctttttattatcatagcaccatatcctttataattatttactgtctgcttctgctgaccgatataactccgctaagagctttaagctttctctttatagtgtcaagctgactcgtatttgaaatctcggtcgttatttctattatagccaaatcgtttctgccggttctagcgttaacattagttacaggcgcttttgcatcgtttataacagtcagtatatcaaccagcagattaaccctgtctgaagcggttatcgtaatcatcgactggaacgaagacggcggagtatcgcctgcccaatgaacagaaatcaatctgttccgctcctgctcagacgcagcggcatgtatcatattcagacagtccgctctatgaacggcaacgcctctgccgcgggtaacataaccgactattttatctcccggaaccgggttgcagcagtgtgaaaacctaaccatgcagttatctataccctcaaccacaacgccgcttgtattgggtttggctgtggtcttcaccttcagcggaacattgagctctgccggagtaagctccatttcctgaagctgtttatttttgcattcggtcagaaacctggttacaaatcgattagcgtttgtgcttccgtatcccacagccgcatacaaatccattataccgttaaatccgtatttctttagtaacgggctaataaaggattcatcatttatatatttgacaggaatactgtttttagacagttccttttctatagtctcttttcccttttctatattttcctcacggtttacctttttaaaccattggtttatcttgtttctagcctgagacgtcttgcagattttaagccagtcaattttcggtccatgcggaaccgaactggttatgacatcaataaaatcaccatttttaagctcgtgcgaaagcggcacaatctttccgttgacttttgcaccggtcattctattgccgactgcgctgtgtatcctataggcaaagtcaattggggttgagcctgcaggaagactgacaacgtcgccctttggtgtgaagacaaacacctcgtcgctgaacatatcaatttttaaggtgtgcataaaatcttcaggactggtgctgtccttttgaatttccagcagatttttaatccattccagcttgtcgtccatatcactggaaccgcttttaccctctttatacttccagtgggcggcgataccgttttcagctatttggtgcatttcccatgttctgatttgaatttcaaacggggtgccgttaggtccaataagcgttgaatgaagcgactgatacatattcggcttaggcatagctatataatctttaaacctgcctggcatcggcttgaacaattcatgcaccatacccagcaccgcgtaacagtctgaaactgtatcaactataacgcgaaccgcaaataagtcataaagctcgtcaatagttttattctgcataaacatcttgcggtatatactataaaaatgcttggctctgcctacaacatgagcttttatatgaagttcatccagcttcttttgaagtatttcgataatctcgccgatatacttttctctttcttcacgcttctgagctatattgtcaactatctcataatatcctatagggtctatatacctgagcgacaagtcctcaagctccatttttatctttgacataccaagcctatgagccagaggggcataaacctccaaagtctctcttgatattgccctttgacgctcctcaggcatatatttcatcgttctcatattatgaagcctgtcggccagctttataactatcaccctgacgtcttccgccatagcgaaaaacatttttctcaaggtctcaatctgctgttcctctttagaagagtatggtattttatcaagctttgtaacaccgtcaaccagcagagccacagtctctccaaattctcggactatatcctctcttgtggagtcggtatcctccacaacgtcatgaagcagcgcggcaactatagactccacatcaaactccatttcagcaattattgaagcgacttgaatcgggtggttaacaaaaggctcgccggattttcttgtctgcccgtcatgcttttcgacagcaaaattatacgccttctccaccatggacaaatcgcctgttttattatattttcttattaactctataagagtagaaagttcgttacctttcataattcatcactcgccatatagcagtttgaaccggtctcatcaaaaaagtatgctaaacgcgatacatctaagatacagccggttcattccatatttatttatataattagtatttcttttatcttgcgtctttaaactccgtttttctcatatctttcaaaataagctgaacattttggaagcctttatagtcgttaatgtcaagagcaaaagcaacgtcaatatagtcgccttccctaaacatactataataatctcccattccaaaaccaacggtatccaaatactttccgtccttataaagggtcatgcgcagatgcttgccctcgctcatcacactgattctgtgaatctttatattgcggacagaaaacgacggcgttgggttgtttactccaaaaggctggagcttatttatatcatgaacggtatctatcgttatataaggaaccttgatttgagcgtccagagatatagtaggaacaagagtcatatcctcaattcttccctttgcatattcgttaatcttttttctgaaatcctcaatattctcagccttaatagtaaggcctgccgccagctcatggccgccgaacttttctaaaagaccgctgcagttttccaaagcgccaaacagattaaatcccgcaatacttctgccgctgccctttgctgaatctccatcaaccgcaaacaaaatagacggtttataatatttttcggtaatcttagatgaaactataccgacaataccatggtgccagttctcatgaggaataaccaaaatatcatcatccttaattccaggatgctgttcaatatattccaacgcctctttaaacatcttctgctcggtctgctgtctcagcgtgttttcatgacagagagaatcagccagcttagccgcctcctcttcatcttctgtaaggaacaattccacgcttgtagaagcacagcccaaacgtccgctcgcattgattctgggagctatagtatatccgatagttgaggttgtgattgccttgccatttgtagaaacgtcaatcagcgcttttaagcctatatttttagtggtcttaaatctctttaatccttcggttacaatcacacggttctcgtctataagcggtgaaatatcagcaaccgtgccgagacacattaagtccgcatattcatccattagattttcgattggttcagaactgtcaagcgcctgtatcagcttaaacacaacgccaacgccggcaagacttttaaacggatattcgcagtctttcctcttagggtcgatagccgcatatacgtcaggaatactttccttacactcatgatggtcggttattataaagtcaataccaatagacttagcataatcggcttcctcaatggcggttataccggtatccacggttataataacggcagtgccgtcagcctttatcttatcaagagcgtccttgtttacgccatatccctcaaccattctgtccggaacataaaatcccacttccaaacccatgtttttaagatacttataaagaatcgctatagatgtgattccatcaacatcataatcaccataaatagtgattttctcattattctttttagctaaaagaattctttcaacagccttatccatatccttcatcaggaatgggtcgtgcataccgctcaggtcacgggcaagaaaatcttttatctgcccatcttcacggataccacggttataaaggataatcgcggttaaaggtgaaatattgaaattcttagaaatttcaaccacccttgccttatcaaattctttaagtatccatttcttctttaacatacaaatttatctcctaaataaaattagtttactaatttaaacagtcatttcaatattttatcattactttcgaaaaaatacaacaatttttttacaaaaaacaaaaattttaggaatttggtcaatataatacttttatatcactgttttacagataatcggctatttgagttccactatcgtaacgccgatatcgccctcgccgaacctgcctaagcggtattttctgacatgcggatgatgccgcagatattcatgaatccctgccctcagcgcgcctgtgccctttccgtgaataaggctgacttcactgaggccgctcaatacagactcatccaaaaacttatcaacttcaagctccgcttcgcctattgtcatacctcttaaatcaacttcggtctttccgctcattgcagtattgattcctgtcgacctctttggagccacatagctttcaggctttgaacccttttcatcttcaagcaccactagatttgaaatcttagcagtgattttcattatgccaacttgaattactgccgtctgattatctttatttatcgaaagaacagttcccttatcgttaaggtctataatcagaacattggagccaagtttcaaagtgtttaaattaacgttcgactttacgccgccgctcctgcggtttttggggcgtacattagatttttccttgagtttcagctctttgcgaacctcttccattgccctgacagcttccttatctcgcttttccttttgaagctgttttatctcttcaagcattctctccgtatcttcctgagcctgctttattattttttctgctttcgctcttgcattatcatatattttatcctttttcttatctatcttttcgcgctctctttgcagttcatctttgagctgctctatttcacggcgcatccgctcctgctcttctctggctttttgagcggaaaccctgttttcttcaatactgccgagaacatcttcaaactttatattctcatctgacaatttctcttttgaacgctcaattatactatccggcaaacccaattttttagatatggcaaacgcgttgctcttgccgggcacgccaatcaacaatttgtaagtagggctgagggtttcaacgtcaaactcgcaggaggcgttttctataccgtcggtcgaaagcgcgtatagcttcagttcactataatgagtagtagccacaatctttgcgccgataagcctgatactttcaataatagctgtggcaagagcggctccctcaaccgggtcggttcccgctcccagctcgtcaaaaagcacaagagagttagggcctgcattctctactatatgaactatattcttcatatgtgacgaaaatgttgaaaggctctgctctatactctgctcgtcgccgatatcagcgaaaatatcatcaaacacaggcatctcgctttcctcgttggccggtatgtgaagccctgcctgagtcataatacaaaataagcctatagttttaagcacaacagtcttaccgccggtattgggtcctgtaaccaccaaaacgtcaaaatcatctcccagccgaacatctatcggaactatttttgacttgtctataagcggatgtcttcccttaacaatttttattttgccgtcagtattcaattttggacagacagctttcatgtcaagagccagctttgccttggcaaaaataaagtctattaaaatcaaagtctcatagttatacttgacctgctcagatatttcagcaaccttgtttgacagctcatataataccttttctatctccgccttctcttttatctccagttcgtgcagttcattattggcgtttacaacgctcgacggctctataaaaaccgtgctgcccgaggcggacatatcatgaactataccgggcacctcactgcggtgctcggctttaaccggaacaacataccggttattacgcatagttactatattatccatcaaaaacttttgatagtgaccggaacgaaccatgctgtcaaggctgtcctttattttggcacctgtatttttcatctttcttctgacattagccagagcgggactggccgcgtccgcaatttcatcctcagaaacaatcgctctgtttatctcgtcctctataggtttagcggagacaagctcagaaaaatattcctcaagcgctcctgtctgttccttagtatatctctttaaatttctgatacattttaaaagcctggccacattaagaagttcggccgccgaaagtgcgccgcccacatcaagacgctttatcgctccgtcaaccggctctactcttaatatttcgggcgagccaaatttaagcgacatagtaaccgcagcatctgtctctgcaagcgccctttccacctcgcggaaatctgacgacggcttcaattcttctgccattgtttttgcgtcgtcatttttagcacactctgaaagcgactttaaaatttttgtatattcaagagttgataatgatttctcttccatctcatatctcccagatttaaattcaattttgaaaagttccgttatagcttattatcccggaaccaacaacttaatattatacacaaataacagcggatagtcaacacgcaccccgaatagtataaaattaatatattaaaagtaataaaaattgttgaaaattaataaaaatagtattataatagatttacagtgtgtcgaaaaagataaaaaacaaaaggcgtttaacttttaaattaattttataatttaaataaatctatttattataacataaaaacaaagttaacttctatatataataggagctacaatgcgtaaaaaagtggttttgagaaaaaaactgcataaacataataagctcctcagatgagtgaactgttatctaaactgagccgaaggatgaaaaacggctcgaaaacgctgtttactctccttgagaccactccgcagatgaagaggctaaaacattaacttttgtctatctgcaatatatacacagatatttgtgttgtaaatataattaattaaaaaaacaggtcatataaaactgatcataattaaattaaaaaataataagcagtcttgtctataaattgaaattgtatcataaatataataaaaggagtgaattttatggcaaaatacaaatgtcccatatgcggatttatttttgatgaagaggctgagggaaaaacaattgatgaaatcgaattttgtccggtctgtaaacatccggcctcagattttgaactcattgaagaatcatcagatgagccaactgaagcaaacgaacctgacaaaattgaatcgtttaaaactgaacaggaaaacaaaattgacctttcataccccagagaatatgagcgacacgataaaacaataagatatatggacgagattcaccaaatggcggtgaccggaaaatccattatatcagctatgggtacaagccgtccaatgccgaattgggatgatatacttatactcggagcacagctcaatcctccgccgcttgacgaacacgcccatgtctataccacaacagtaataggtaaaaacgctaagcgcccaatggtcatagaaaacccggtatacatatcgcatatgtcttttggagcaatgtcaaaagagactaaagttgcgctggcaaaagggagcgcgctggcaaaaacggcaatgtgcagcggcgagggcggaattctgcctgaggaaatgcaatccgcctataaatacatatttgaatacgttcctaacctttacagcgttacggatgaaaacctaaaaaatgcagacgcaatagaaataaaaatcggacagggaacaaaacccggaatgggcggacatcttccgggagaaaaagtaacacctgaaattgccgaaatcagaaacaaaccgctgggtcaggatgttataagcccgtccaaatttccaaatatcaatacgagagaagatttaaaaaatttggtttcagaacttcgcgagcgtagtgacggccgtccgatagggataaaaatagcggcaggtaaaatagaaaaagatttggaatactgcgtttttgccgaacccgactttataacgattgatggcaggggcggcgcaaccggagccagtcccgcaatagtcagggattcgaccagtgttccgaccgtatttgctttatatagggcaagaaaatatcttgattctgtcaaatcagatatttcattggtaataacaggcggactgagagtatcgtccgattttgcgaaagcgatagcaatgggcgctgacgcggttgctgtagcgagcgcaggcttgattgccgccgcctgtcagcagtatcggatatgcggaagcggtatgtgtcctatgggaatggcaacccaggacgaggaattgagaagccggtttaaagaggaaccggcagtattaagggttgctaatttcctcaactgttctttagaagagttaagaacgtttgcgcgcataacaggtcacgaaaatcttcacgatatgagtgtgtcagacctctgcaccaccagcagggagatttcagaatttacaaatattccgcactgctgatatgttcggtatagcagcctagcccaattgcgctcgccggacccgagcgcgtaaaccatttttaatttgttgtttataaactaaataaccaataacatcaactttatatggaattagccgctaaagcaaatatctgcgccgcccgggttcggcgggcggaaccgggtctggctcagcaaactagctattagaattatagttaccggattgtctaatatacaaggtatttatattttaaattattcttcttccagtatcagttgatgctttcattggtatgcagcctatcccggttgcgctcgccggacccgagcgcgtaaactatttttttgacttactgtttgtaagttgaataaccaatatatataattatattattttgtttataaaaaaactatcctatatactttgtatatgaccccatgtaaaaaatttattattacataatagggtgtttgaaccatttctttttctcgtaagaaaaagaaacgcttcaccaaagaaaaagtactgctcgcttaggtcgcctgcggctccaaggggcgctcgcccccgctaatttcatcttgaatctgcgcttcaagatgaaaaagccttgttttttcccgttgactttgtgaactaccgtgaataaagatattccgcgttcctatttatttaattcataaaaaaagtcggtttttcagtgaacttcggtagggcggtataaccgccctacgccctcataaaataaaaaccgtcatatgcttgccattctcggtagctgtatgacggtttttatattttatttctcatttcttttattaattctaaaactaaatttttttgtttttgtgttaagaatttccattcatcatgtagttccataagctctggagaacactcaatcatatcatcttctgcaaaaaattctgaaagagaaatatttaaccccttacaaatcatttcaagtgttggaattgttggaatacttccacgcttaaaaatatttgtcaatgtttcctctggtattccgctgtttttagcaagcctataccgtgataaattttgttttttaagcagttcattaagtctatcctgtacattcaaaaaaatatcacctctttcgaactaatattttataacttctaatcattctcaacatctaaaaatttatatacactaacacctaacgccttacctattcgaaaaagagtttttaaagaaggagcatagttaaaattcgtaccttccaattgactaatatatacctgacttaaattagaagcctctgcgagttcttcttgtgtcatatttcctgaccggcgataatatccaattttcaagcccactcgaataataaactcggcgtattccttttcaaaagctatactatcttttgtttgattattcttattgcccattggtatcacctcttttgagctaatattttataactaaatagactttctgtatactaattaaattaaactatatatggttataaaaaaatatatacggtttaatttatttttcatttcttttacaaattgcagcattaattctttctgctttggtgttaaaaactttccctcactatatagctcctttaattctgatatgagttcaaccaaatcattgtcagcaaaaaattgagatgaagtaatgttttaaccttttcataattctaaaagcaattcaatatttttctttaaatattctaattgcttgacatttaatttctcaatatttggcctaatactttctaaaaaaacatcaacgttatcatcagataaatcctttgcaaatgcgtctgtcggaacatttaatgctttcgctatctggattaccatgtcaaaacgtggattatgatacccctgttcaattcttgataaatgtttttgagatataccagtcgtctcagcaacctgatcttgtgttagatttctttgtattctatatttttgtattcgttgccctatttcaactaataaagcatctttttcatctttacttttcacctcaaaaacatcctttcaattacttatctatctatattatactatttatatacttaatttataacttgaattctaaggtgtatctttcacattttatctttggttaagtaataaacggataagttttattaaaaatatatagcatacaaacacaaaaacaattacttaattcaatactaaactgtatattaaaatttatagtccaaaagcaattcaatatttcttttcaggtattccaattgtttaacacttaatttttctatcgtaggtttaataccttgccaaaatagttcaaggctatcgtctggcatatcttttgcaaacgcatctgttggtacatttagaacatttgctatttgaattatcatatcaaaacgaggattgtgatgaccattttcaatccttgacaaatgtttggaacaaatttctgctgcttctgcaacttggtcttgtgtcaaatttttttgctttcgatattttttaattcgttgtcctatttcatatagcaaaatatccttatcatcattttccataagcaataacctcttccaaaaaattatatatattattatatagcttatctgtacttttgataacttgatatttcaagatataattcgaaatttatattgatatatgtaatatttggattgattttattaaatatataatgtataatcgtattgtaattattactatattcaagaaaaattataaaatcacggggatgttgaaaatgaaaaaattttcattgataatcttgatatttgtaatagtatttaatatttccgcttgtggtacgataacgaaaactaacgtaataactaatcctgctacagataccacgtacgcaacagctatgccggaaataaatgaatcagcaataattccggaaaactctacctttgcagttcattttatagacgtaggacaaggtgacgccgcattagtattatgcgacggaaaatcaatgctgattgacggcggtagacccaaagcaagtgatgtaatatatacctatctcaaaaatcaaggaattaactgtttggactatattatctgcacccaccctgacgaggaccacataggcggactttctgctccgctttccacaatcacagtcaataacgtgtatgcacccaatattgaagctgatacaaaatcatatcaaagtttcaagcaaaaaacagaggagcagggcttaataataaaacaccctgtctgcggcgagagctttcagtttggcagcggcaccgttaattttttcggcccggtcacagaatcggaaaatgataaaaataacagctctattgttatgaaaattatatacggtgaaacttcgtttttgtttaccggagacgcggagcgcgaggaagaacagcagattttagataaaggctatgatttatctgcgacggtgcttaaagtaggacatcacggcagtcgtaactctactacctacccgtttctgcgtgagataatgccggaatatgcggttatttctgtcggtaaagacaatacctacggacaccctacggaggacgtgttgagccggcttggggacgccggagcaaaagtttacaggacggatattcaaggagatataattgctgtaagcaacggtcataccgtaactataacaccagccaaaaatgcggacgctgatacactatcagcgcaaagagacgttacaacgccaaagacggaagctaaaggagatacagtggaggcaggttatatcggcaacagtaaaactaaaaaatttcatctgccgtcatgtaaaactctcccggcagaacataacagaatgtattttgatacccgtgacaatgcaatacaagcagggtataccccttgcggcaactgtcacccataattttaaatttggaggtttatatatgctttattggattagttttattattttatttgttagctcattagctgtcttattgtgccttttacatatgttgaaaaataaaagaaaacatgattatatggaaaaagagacttttgtagtgtttataattattttttgcgttatactgtttttcttgatttatatgagtacagatatacccagcgcattaagcggcggtcaggatttatatgtaaatgaattgccgacacgcattgtctttggtccacatgtttcatatgtcgatacagacaataaagaactgaaacatctaaacggctgtgactggaatgcttacgaaaaatacgggaattatcatattcggtacactaaacatactaagtttgtacttgatatagaaaaactcgattaaaaataaaaaggacaataatttatgaaagtatcaatttaaatgcgaaaagaagataatataaaatataaatacttgatttattagatatttcggtaactataattctaagagatagtttgctgagctagacccggttccgctcgccggacccgagcgcgtaaactatttttatgtaataataaaatttttgtatatgtggtcatatacatagttaattttaataagtaaattgtatattgaacactgcgtgttcagatggtagctcacctaacgaggcggctatgccgccctaccgaagttcactgaaacctctgtttttttgtgtgttaaattaaactgaactccagcttttttgataagtaaataaataaagaactcggagtatctttattcacggcagcacacaaagtcaacgggaaagtaacaaggctttttcttttgtgcgtggagcgcaaaagaaattagcgggggcgagcgccccttggagccgcaggcgacctaagcgagcaagcactttttcttttatttgagtattcatattattgacattgtaggttattcaaaacaagtaaccttgtattacacacacctcgtataataaagtagtagttaatattgttcgattttaagggcatgtgctataatgttattagatactgtggattagttacacccacctaccacttgatggtttcttgaaggctctaaccacagtctctttatacatttgttaattagttagataccgcacgacggtttatttagaacgaggttacaatcgtaaagagtatctgtggaacagtatcaaatattttttcaaaggagtttttagtatgatttttgttggtatcgatgttgcaaaggacaagcacgactgcttcatttgcaattctgacggcgaggttttatttaatgcttttactattcagaacactatagaaggttttaattttctttatcaaagaattgaatctgtttcaaaagattttaacaaagtaaaagtagggcttgaagccacaggacattactcatacaatcttttgggttatcttcttgataaaggtttgactacctttgttatcaatccattacataccaatctcttcagaaagtctctcagcctcagaaagactaaaacggataaaattgatgcccatacaatcgctatgatgttaatgtctaatgtagacttaaagtcctactcagatatattatatcacaacgaagaattaaagtcactaaccagatacagattttataaagtttctgaaagagcaaaactcaaaaccactgtttcccggcttgtgaacatacttttcccggaacttgaaaaacttgttccttcgctgcatataaaatctgtctatactatgctttcagagttcccgtcagcccatcatattgcagaagcccacttaacgaagcttacaaacctgctgcatactgcatctagaggcagatatggcaaagatactgcaattggttttagggaagccgcaaaaaactcaatcggttcagacatgccagcaaaatctcttgagctaaagcataccataaagctaatacaagaacttacagcagaaattgaggagatagaagcagaaatcaagcatattatggataacataaacacgcctattctgtctatcccgggtatcagttacacaatgggagctatgatagtagcagaaataggtgatttcagtaagttttcatctcctgataaaatacttgcgtattcaggaatgtcaccatcaacgtatcagtcaggacaaataaccaatagctattcacacatggagaaacgaggttcgcgttaccttcggtacgcattatacaatgcagcaaaatatgtatgtcattgggatgaaaccttcaagaattatctggcaaaaaagcgaactgagggaaaacattacaatgttgcaatatctcatgcagtaaaaaaactagtgagagtaatctatcatttacagaaaacgggtcagagttaccaagccgtttgagtttatgtaatactgtatttttaatactatttttttaagcaatttactattgctttatttgacatacaattttctagtttccttatttgaccgaaaagattttaactttttttatttttctattgacttttaatagttagtcttgcaggtgtggtcacaggtgaagcgtttctttttcttgccagaaaaagaaatggttcaaacaccttattatgtaataataaatttttttatatggggtcatatacatagtatatagatagtttttttatatattgaacactgcgtgttcagatggcagttcacctaacgaggcggctatgccgccctaccgaagttcactgaaaaaaccgcttttttagtgtaataataaatgattcaaacacctcattatgtaataataatatatattatatggggtcatatacaaagtacataaatggtcttattaaataatataacagtttttaaaaaagttaacgtataggcttggtcacaatcttagtcttcgttcgaaattacagattttattcttatatacttaaaaactttaaaaatcaagcagtaatatcctttaaattattacatgtaactcaaattaaaaggtgctaaatattactaacaaactttttctcttattcctcttccttattatataaaaaaactattgactttataattgttatattctataatagttaaacgcttaactattaagcggtttaaacaagcttattatactaaagtatgtggctgaaagctaaatcaagctaaagtcaggaggtgaaatttatgattgattaccgtgaagttaatgggcgtatcgacaaatttcagattttaaaaagaagcaccctttttagtctgtttgaggacaacaaactgcatatccgtcagctcccggtgcttgaatacataatcaaaaacgacggatgcagccagaacgaactcgctgaatttttgtgcgtttctcctgccagcatcgctgtttctactaaacgtatgcaaaaagccggatatttagaaaaaaaggaagatgaaaacaacctcaggaaaaagaacctttatgtgactgaattaggaaaagaaacagttgcaaaatgcagaaaaatatttgactcatttgatgaaaaagtgtattcgggaatttcagatgatgacctgaatactttttgtaatgttattgacagaatgacaataaatataactggtgagagtcaaaacaatattgaccctgaggaactccttcgacttaaaccaagacaccaccactgcgaaaagttcaacgactgtatagatttttatgacaaggaggacaatgataaatgataaagaccctggtaaaacagatgtccaaaaaggatagaaaattttctataataactccatttctgattattggagaagtaactatggaaaccacaattcctatgcttatggcaactttggttgatgtcggaattcaaaattccgatataggctatgttgttaaaatgggattattaatggtgcttatggcaatgctttcactcgcgttcggagcaggagccgccagaaccgcttctgtcgcttcagcaggatttgcggcgaatataagaaaagcattattttataaaattcaggacttttctttcggaaacatagataagttcagcacctcatcattggttacaagaatgactactgatgttacaaacatacaaaactctactatgatgatacttcgaatgtgcgtcagagcccctgttatgtttgtaatggcgcttataatgtctatctccataaacgcaaggctggcgtctatctttttagtcgctatccctataatcggaataatggttgttattgtctctaaattcgctatgccgaagttcagaataatgctcaaaaagatggaccaattaaaccgagttgttcaggaaaacttatccggaatacgtgttgtaaaggcttttgtccgcggagaatatgaagacggcaagtttgaaaccacaacgcgtgaagtaagagacacccaaaaagccgctgaaaaacttatcgttgtgaatatgccgataatgcagcttgttgtttactgctgtatagtagctatactgtggttcggcggaaacatgataatggtcggcgatatgcagaccggtcagcttattagttttatttcatacgtaacccaaatacttatgtcgcttatgatgatttctatggcttttattatgcttgtaaactcaaaagccagcggcgatagaattgttgaaataatagacgaaaaaattgatattactgacgaaaaggctaatgataaaattctgctagaagacggatcaattaaatttgaagacgttgcattcagttaccacaatgatattatgaactgcgccgttcgtcacataaacttggatataaaatccggtgagacggttggtattataggcggaaccggttcttccaaaacatcactggtacagcttattccccgtctttatgacgtaatccaaggcagggtgatagtcggagggcacgacgtccgcgaatataaactagaccatctgcgtgaagaggttgctatggttctgcaaaaaaatgttttgttcagcggaaccattattgaaaacttacgctggggcgacgaacatgcgtctgatgaagtaataaagcaggcctgtatagatgcttgtgcagatgacttcataatgtctctccctgacggctatgaaaccaatttgggtcaaggcggcgttaatgtttcgggcggacaaaaacagagactttgtatagcgagagctctgcttaaaaaaccgaaaattattattttggatgacagcaccagtgcggtagataccgctacagacgctcagatacgtgaaactttcagaactaagctcaaggacaccactactataattatagcccagcgtatcagttctattgaagacgccgataaaatagtggtaatggataacggccgcataaacgccgttggaactcacagcgagcttcttgaaaacaatgaaatctaccgtgaagtatatgaatctcagaagaaaggagctgaataatatgccgccgatgggaaaaggaaaacaaggcgtaataagaaagcctaaaaacacaaaaaagacagctaaacgtctgtttagctattttaaagaatataagttcatgctatttatagttgtgctggcggttatagtttccagcggagccaacgttttgggcacatatcttctgaaaccggtaatcaacgactatatagttccgtttattggaagtcagaacccagacttatcaggtttcatacaagtgatagtattcatgctggttatttatgttatcggagctctttcatcatgggtttataacaggattatggtaagcgtgtcatgcggtgtgctgtataaggtaagaaaccaaatgtttgaacatatgcaaaggcttcctatcaaatattttgatactcactcgcacggagatgtaatgagccgctatacaaacgataccgactctctcagaatgatgatgtctcagagcgtgcctcagctgatatcgtctcttttaacagtcatatccgtctttattatgatgattattctaagtcctatgcttaccctgctggttgttggtatgctggttattatgctgatagttataaaatttatcggcaagcgttcagcccacttctttaaaagacagcaaatatcgctcggagcagtaaacggatatgttgaagaaatgattgaagggcaaaaagttgtaaaggtattctgctatgaggacaaatcaaaacaaaaatttgccggcttaaacggttcacttgaacacgccgcctccaacgctaacacctttgccaacatactaatgcctataatgggaaacctctcatatattcactacgcgctcacagctatgataggcgcatatttgactataataagcggaaacagcgacgccggatttttggcgctcagtattggttcgctggcagcctttctgcagtatacccgctcattctcacagcctatcacacaagtatcccagcaaatcaactccatacttaacgctatggctggagcggaaagaatttttgaacttcttgatgaaaacgttgaggttgacaacggaaaaacaacagttgtcagagccgaaattgacgacaatggaaatataaccgaagttaaccacagaaccggcagatgggcttggaaacaggttcactcaaacggtcagatttcatacacagaagtttgcggagcagtcgaatttgaaaacgtaacattcagctacgacggcaaaaagaccgttctaaacgatatttctctttatgctaaaccgggacaaaaaattgcgttcgtaggctctaccggagcaggaaagactactatcacaaatcttattaaccgattttatgacgttcctgacggaaaaattagatttgataagattaatataaacaaaattaataaagatgacctgcgccgggcgcttggaattgttcttcaggatacacatctgtttacaggcaccgtaatggacaatataagatacggtaacctcgaagcgagcgatgaagatgttataaaagccgcaaaaatagcaaatgcacactggtttattacgcatcttcctgatggatacaacaccatgctgaccgccgacggtgataatctcagccagggacagagacagcttcttgcgattgccagagcagccgttgcagaccctccggtactgatactcgacgaggcaaccagctccatagataccagaacagaatctcatattgagaaaggtatggacgccctgatgaaaggcagaacggtattcgtaatagcccacaggctttcaacagtaagaaatgcagacgcgataatggtgcttgaaaacggtgagataatcgaaagaggaaatcatcaggatttaattgagaaaaagggcagatattatcagctgtatacaggagcctttgaattggaataaacacaagttttgagaatataacagacgggtggattatgcgaatccacccgtgatgttttttataacgtctttatacaatatagtactcttttacaatacctaatctaactgttttaaaagtttataaaactaaaccggaaagcttacatcaaaacaggtagaaaaattaagggtgtttttaaagaacaacagtaagatgtgctggcactcctcgttatatgagctgtcatataacgttatctaattaatatttcatacctgctaaaattatctaaaaaaacaatattaattttctactgactttctaatacttccaatacactataaaacacgtttatatttttgctgtaataacaagtacaatgttataacttcacaataaagctgttaaaacctaaaacagcttagttggctctggtatatttggttatattatccctaaaatctctcggtgacatgccatagatatcatgaaataccctgttgaatgtacttacactttgaaatcctgagttctccgccaccgtaatgattttatcatctgtcatacgcagaagatttgctgcatattctgcccggacaattcctaaatattttctgaaattcatctttatcttctttgaaaacactctcgacacataggtctcagccacacataattcgtttgctatggattccaagcttataggctcagtaaaatgctcctcaatatacttcataattttaaagcttatatcttcaatcggtgcatgtatttcctgcgatagatttaccgattctaaaattctgctcagaattattaccgtccaggcaatctgaagattttttgacaggctgctagaaatactctcaaacgcatatttagcgtccggagataattcttcctttgctataatcggatttaatggaaagctgtcggtcatatcagggaaaaatctgccgtaaaactttttggaacatattatcagcatctcatcaacaccggaaactgaaatattttccttataatactcatgtacaatatttgggaatattacggctgtctccccctgcttaagcaaataagattttccgtcaatcctcaaatgctgagaaccttttctcatgtgcaatatttctatatccatgtgtatatgagggctgtatgccacttcatataggttatttttcacagaaaattcactttttctaacttcatagaattgattcatgacttttcacctctatattatagagtatatcacatttgtaataaagtttcaactactcagttcaatttttgggcagtttcagtctataaataaatagattattactgcctgtctgatataattaagctgatagttaaataaattaaggagatgaacagttatgaaaggattgtttaaacggcttatgggggtatttgttatagtttctcttgtatgcagcacttttgcagtgccgatagaagtaaacgcggcttccgatacacaacaagtcgatggaacaacgggaactccgctcggaggattcggaaccggcggagtaaaatttaacgcaaggctcggttcttttgccgcactgacaaaggcgccggctgacgcaaacgactacactgcattaaaagacgctaaatttcagctttacacaaacagaaacggctcaataaaaacggttgatacaatgaaatcagcttcaagcaacggccgttcagaagatgacgcaatatggcctatgcacttcgcaaatatgggttcaacaaatgatgttcaagtaaatttaaaggcgttttcacctttggacaatgtggactatgacaatatgagtatgccgtatgcgttctatgaaatgacgctcgagaaccttggtgatacaagcgttgacgcttcatgcgcattccagctcactacaaacgacataccagcccttgttgacggaaaaggttttaacggcaaaaaatgggctatatatggaaactctgaacaaaacggagcaatagtatcagttggaaacaattctgattttaacaccaccggcgtgcttgacaattctatcagcggaaagaccaataaggttgctgttaaagtaaatcttgacgctaaacagagcaccgtaatcagatttgttctcgcatggtatgacgattcagaacctgactggcattattatctaaatctttacaataatccgggagatatagcagcaagaggtttagagaagtttgacactttaaaaaacaatgctgaaattcttattaccaaaatgagagactccaatctacctgattggtttagaaatcaaattcaaaacactcttgtaaacatatcaaacaactcgatgtataaaaaagatggcagagttgcatattccgaaggacaatggacctgtttcggaacaatggatcaaatgtggcaggcaaggcaggttattgctcagtttataccattctttgcatggcgtgaactggaatattgggcaagaactcaaagaaacgacggacagattcatcatgatttcaacacagcggtagaaaacaaagctgaccgcgccgagcttgttgactgggattatactgagcatcctgactatagaaacgttgataaatgggtagaccttaactgcggtcttattatttcagtttatgaaacaatgcaggttgcaggcaatccatcaacagacggcataatcttaggaaaagacccaattccggaaggaaccactatgctggattacttctggccttatctaaaaaaagccggagacagaattttaaaacaggttgaactctacggaaataaaacatatccgtatacatttgacagttctgaaaactcgtatgacgcaggcggaaatccaaacccgtataatgcaagtgtttcagcggtggcttataaaataatggcacgtttggctgatgagatgggtgaaactgaagaagctgcgaaatatactacagcatataataccgttactgattcttttgcaaaacgttatctttcaaacaacttcccggaagacaaacgtgtcagcgaatcattcttaacaggacaatggctctcacttcacctaaaattaggtcaaatctggacagatgaacaaacagactatgcactttcagaactcgacagtttctatcatccatactattggggtatgggaactttaaaaggtacctacaacgaatggacgccgtacactcttatgcactatggcggactgcttctgcaaacaagaagagaaaacatttttgaagcaatgcagcgtgattcatacaacagacagtatacagacagaaacaaggtattcaatcatccgcttgatattctgccggcagtaaacacaccgaactatgctgcaacaactatatccggcgataaacaatatatcagcatgccgggactatggagaaattataatgacgtagtcggatattacagagaccagcgcacaaaggatatttgggttcagcccagacttcttccggaaatgaacaacgtaatgacagacggaatgtttgtaatgcctgaaggatacggaacagtcagctgtgttgaaagcggcgaagcaaatcaaaatcagaatatgactgtgaaatcggataatccaattgctgtcaaaaacattcacctttctgacaacttcggcgaaaccaatccagtcgttcagataaacggtcagcctgttaacttcaccagaaccggaaccggatatgataaggaacttgtcgttgaatggaacggaactctcgacagcacaggcattactatcgagacaagcggcgaagcaggatatactgttccggcacttcccgaaaaacctgaccatggtccggatgacaaaccatcgggcgaagtaaaaaatccatatgaatctatttcagctaccagtgctgaaggaaaagttaaggttgatgtggaaaccccaatgggacaggattggtttgttagaaatcaattcaactatgactcacatataatttttgaaaatgttgatttcggagatgtgggttcaaatatgatttcagcaagagttgcaagcgtcgattcaggatttactctacaggttaaactggacgcggtcagcaacgacataataggaacaatagaggtacctaacacaggtgacgaacagacctggaaagaagcctcatgtacattgaatgaaacagttaaaggaaaacatgatgttattatagtttttgacgctgccggagcaagcggcgaggacgcaaagtttgtaaaccttaacagtataaaattcctgcaagcggacggcagacttgacagaagtgcatggaaaggctcggcttcaaacaattcttccagcacatatgcagcatgggacggagacttagaaacaaaatggcactgcagctggcaggaagtcggcaaatacatgactattaattttggtaaaactgaaaagtttaacaagatagttattgacaataacaccaagactactgaccatcctaaaggatacgcactatatgtatcaaatgacggcaaaaactttggagaccctattgttaccggaaatccggaacaggacacaaaactcgtaatcgagttccccgaacagcaggctcagtatattaagatagtaataactgaagctaactcttcaaaatattgggctgtaaacgagcttaatgtgtttatggaaaaagagcctgaaccggaagagacagacccggcacaagtaggagtattttcaggaacctcctctaaccacccaaccggaacaaaatatttcaatataacaaaaaatgatttaggttcaaagcctgcaagagttaattctaacactgaaagagcaaaatttgttgacggaatcgacgctaaagtaaaagcaatatttgcagataaaactgatgaaacgttgctgagagaaaaatttactcaaactttcgtcaattatattgggaaaagcggagattatgatgtcaaaccaactattgcagacatttcactcccggccggcaagtattcaatctattacttcggaggtgaagatttgcctgtaatcgttgacctgcctgacgcggcaccgggtatggttacagttgacgcctcaaagccttcatacgcttttgcaactattggaaccaagacccataacatgaaagaaatttctcttacagtcagtcaggactacaccggagatattacattctataacgagaatggatggctcccggacctttattctttggtgattatgaatgacaacgctcctcagcctcagcttgtaacagaaataacaggatattcaaaagataccggagttgtttctatcagcagaggagaagatttcccggagaatgctgtcgtagttgcagcgggatatacagatgatgtattaactgatgtgaaatacgcagctgtagaatcaagcaacgaaattgaagttggaacagttgccggagacacagttaaagtttatctttgggattctcttgaaaatatgaatccgctttgtgaagcatattaaaaacaaatttatggagcagcaaaaatgctgctccataattattatataaactaaaataaaaataatattttataattacaaacccattttcttaaataccttccgctattacagcgcggctgtccacattatttttgcgtttggatactatcatattatactcatcggaagcaaaacaagcttccaaattactcttatcttcaaaacgcactactataatgcgctgtggatttctctcaccggaaagagtttgaagattttcagtccgaactaaatattttccgccatagctttcaacaatcggttttacagcattaatatattcatcatactccccgcgtcctttttcttcgttaatatatgtatctacaataaaataccatgccataacataacctccaaataataatttttgttagaacagcaataagtctgtgaatttcaattcgtctataaatatcagacacgggtttaacctaaaataaatactaaattttaactcgaattactttctgcataaatcaaaaacttttttctttcacttataattatcattcccctaaaaaacggaaagattatacccaaactaaaaagtgtaagtcaagaccaccagtaaactggtggcttgcacagcccctataaggggctaatacaggcttaacccctgtaaggggcacagaagtttgacaccgcattactatcacaggcagccgctcacgtgcggctgtcttttttgcctacttattcttgctacccgtaaacgggtttaaatactctttcatgcttatttgatccgatgcataatcctcctcaagttgattcctgatatattcggatattatttttttatttctccacactgtatcaacataatatcctctacaccaaaaatttcttgaaccatacttatatttcaaattggcgtgtctatcgaatatcattaatgaacttttctccttgagatatcccataaactgtgctatacttatatatggtgggatactaacaagcatatgtatatggtctgggcaggcttctgcttccattatttctactcctttttgtttacaaagctttcggagtatttctcctatatctcttttcaactgaccatatatttcttttctccgatatttcggtgcaaatactatgtgatattgacacctgtattttgagtgtgctatgctctttatttcatttgtgctcttctttaacattattaaaaacctccatgatatattttttgtaatgcggtcgccaaaccatttactattatatcatggagatttttctcttgctaaagctttttatcttcctccggtagaaccggatgtttttttccacgtctaaagacaccaataaaacaagcataccaaaattggtatgcttttaaatctatttcatatgctgtcttgaaacctttaaccttgacaatgcgcggttaagcgccgcctgagtttgataatattcccgaatactctgtttctgtctcattctctcttcagcgcgttcttttgcttccttggcacgttttatgtcaatttcttcgggtctttctacggtatccgcgagcaaggttacatacgtcggcatgatttcaactatccctttgcttacagcggcataataccactttccgtcaaccttatatttaagctcgccttcgctggtgcaggttacggttgcctcatgatgtggcagaactccttggaggccgtcaagagcaggaaatatcagcatctcgcatggaccgctgtaaaacgaacggtcgctggcaagaatatcaagtttaaaagttttttcatcagacatgtgaatcctcctcacaagttaaaaagagttataatcttaattaacctttaaaattctttacatcatcaattgtccctgccatcataaaggcgttttcaggatagtcgtccatctcgccgtttataatcgccttaaaacccttgattgtctcgctcaaaggcacatatttgcctttaaatcctgagaacacttccgctaccgaaaacggctgtgacaagaacttttgtatcttccttgccctaaataccgtgactttatcattttcatccagttcttccatacccagtatagctataatatcctgaagttctttatatttttgaagaatctcctgggtttttctcgcaaccatataatgctcttcgccaactatagaaggttccaaaattctggatgtggactcaagagggtcgacagccggataaataccctgctcaacaatttttcttgaaagcactgttgttgcgtccaaatgcgcaaatgtattagccggagccggatctgtcaagtcatcggcaggaacataaacagcctggactgaagttattgaaccgtcctttgtagatgttatcctttcctgaagttcgcccagttcattggcaagcgtaggctgataaccaacggcgctcggcatacgtcccagcaatgctgaaacctccgaacctgcctgaacaaatctgaaaatattatcaataaacaacaaaacattctgctttttaacatccctgaaatattcggctatagtaagaccggtttgggcaactctcatacgcgaaccgggcggttcgttcatctgtccgaacaccaaagcggttttatcaattacccctgattccttcatctcatgccataggtcgtttccttcgcgggaacgctctccaaccccggtaaatattgagtatccgccctgctctgtcgctatattatgtatcaattcctgaataagaactgtttttccaactcctgctcctccgaacagtccaatctttccgccttttgcatatggagcaagcaagtcaataactttaattccggtctccaatatctcaacaaccgggctttggttttcaaaactcggagccgcgcggtgaatactccactgctcttccccctgaaccggctctccgccgtctatggtctcacctaaaacgttaaacatacgtcccagcgtctgttctccaacaggaactgtaataggtttgccctcagacacaacctccataccttttttaaggccttcactggcggcaagcataatgcatctaaccacattattgcccctgtcctgagccacttccataacacaggttttatcattattttggactgtcagtgcgtccctgatattgggaagctgatcggtgctctcaaaagccacgtcaactaccggtccggctaccgaaacaatttttcctatattcataactgctcttacctcctatttcccatctcatactgtcatagagttataccgcgctcattttttatgctggcttttcgcgccgctgacaatctctgttatttcctgagttattgcggcctgtcttgccctgttatacgcaaggttaagttcctgaatcatatccttagcgctctttgtcgcggaatccattgccatcattctggcatgctgctcgctcgcaaacgcttccaccattgttccatatattaatcccttggcataattcgggacaaggttttccataactatttcaggagacgggtcaaatgtggcagtatggtgaatctcacgatgtttgccgctgtgcagattttcaaatctctcacgcctgaacggcagtatttgaagcagttttgcttcctctttcatagacgatatcatatctgtatacactacataaacatcgtccagctcctctgacagaaacttactcagtatcaactcagaaatttctctcgccctgtacatactgggattctgagcagtgtattgaaaatacgcttcatacagtatgccctttctggcaaaatacattctgccgacctgaccaattataaagagcttaatttctccgcccttaacaatctcctgctcggtcagtttaagcacgttatgattataggctcctgccaaccccttatctcctgttatcacgatataaccttttttacgtttttcatttggtatctcatcgcggcggtgaaaatataaattgcttgtatgcggggtatgcttcaaaatatgagcaatagtattctgcaaagtataaaaatatggttcggtatcgtcaagtctttgcttagcgtgcttcatctttgatgaagatataagatacattgcgttggttatcttcattatatcattaacgctttttattctcgaacgtatttcacgcatattagccattatctcacccgctctcagtcttccttactattgttttcgtttaacacaacttccgcttcttctcccgggtcatcagccaatgctgatacatatcttccggtcttgaattccttgcacagctctatgattttttcttcgtcttcatcactcagcgccttagtttcgcttattgtttttattattccaggagctttccgctcaacaaaatctataaagtctgacttaaagtttactatttcatttatcggtatatcaagcagcattctatttttgctcacagtgagcaaaagcacctgtgcataaagcggcaaaggattcagcaaaggctgttttaaaagttccattattctgtctccggtgtcaagcagctctttggtcgccggatccaaatccgaactaaactgactgaacacttccatttcacgatactgcgccaaatctatacgcagatttccggcaacttttttcattgctttggtttgcgccgctccgcctacacgtgacactgaaagccccacgtttacagccggtcttatacctgcaaaaaacagctcgttttccagaaaaatctgaccgtctgttatagaaataacattcgtaggtatatacgccgaaacatctcctgcctgggtttctataataggcaatgcagtgatagaaccgccgccgtgagcctcgtcaagacggctggaacgctcaagcagacgagaatgcagatagaacacatcgcccggatacgcttctctgcccggcggtctctccagcagcaaagacatcgccctgtatgcaaccgcatgcttagacaaatcatcatatacaatcaatacgtcttttccgttgtgcataaaatattcggccatagcggttcccgaatacggggctatatattgaagcggcgccatatcgctggcggacgctgaaacaactatagtataatccattgctcccatattcttgaagtcgctgacaagttttgcaaccgtagaagctttctgtccaacagccacatagatacatataacgtctttgcctttttgattaattattgtatcagtcgctattgaggtttttccagtctgtctgtccccgattataagctcacgctgtcccctgccgataggaaacatgctgtctatcgcaagtattccggtttccagcggaaccgttacaggctgtctttcaataactccaggcgccgggctttcaattggatagaaatcgtcttgctttatctcaccctgtccgtctatcgggtttcctatagcgtcaacaaccctgccgatcaaattatttcctacaggcactccggcgcgtcttcctgaacatctgacctttgagccctcatgaagtccatggtcgcttcccaaaagcacacagctgaccgtctgttcttccagcccctgaaccatgccttttactccggtctcaaatataaccagctcgccgtacatagcgttgcttaagccatacactgtcacaatgccgtcgcccatgctaataatactgccctcatcaacagccgtcatttttacatcaaaatcagatatttcttctttcagcactgaaataacatcacttgtgttaatactgctcaaatctatcacctccgcaaaagtgttctgcgcattctgtctaaagctcccaaaacacttttatcatataccttatcgtttacataaagtctgaaaccgcctattaaatctctattttcaaccaagcttaactcaacagactttacgccatattttttaacaagcattgccttaatactggataccgatttttcactaaccggctctgcatattcaagagaagcttcaagcactgaattgtgcctgttccaaacctgcttataactctcctctatcaaagataaaacgctgtaatcaccgtttttacatactgtcttcataaactttccaaagccgccgtcaaaaattctgtctataaccgcatatttctcttttaagcttattgttggattagccaatgcttgtctgagctcatccatagcaagcagtgcggtgaactccatgacattttttatgtcactgctgatttgatatagtgcctcggcataatttaaagcttctttggttattatctttgctctgctcattttgcttcacctacctcaaggataaagctgtcaacagcgctctcagaaacatcaccgttcttcgctgccttcagcgccgcgtccataacgagcgaggctatctcagacttagcttcagatattgagcgttctttttccagctcaatctgtttgttagcgtttaaaacaatatttccggcgtcttccttggctttgcttattatctcatcacgttttgctttggcttcctctttggcggactttattatatctccggcagccgcctcagcagttttaagcttatcggtgtaagccgcttttaaagcggcggcttcctgtttcgccgcagaagcgttgtctagagacgattttatctcgccctcgcgcttctccatcattgcagttatcggaccaaaaagaaactttctaagtaaaatatacaatatgataagatttacaaaggtccagattatattccaatttaagttaagcattcaaaccgacctccgtcatccaaataataaaaatacctctcctatttcaagaacaggattatcatgattgcgataacgaatccataaatagcggttgcttccgcaagagcacatcccaaaagcagagccttattgatgtcgcctttggcttcaggctgtcttgcaatagcttctgtcgcctttgaagttgctattcctataccaatacctgctcctatacctgtgagtgccgctatacctgcaccgattgctattaatgctcccataaatatacatctcctttaaaatttctgataaatttatatgtagtttaatcaattttctaatttaagactattccgtttcggttacttcctgaatataaagcgatgtcaggaaaacaaaaacatatgcctgcaataatccgtcaaatatatcaaaataaaaactgaatgcaagcggaacaaaaacaggaacaaccatttttataagctccataataacaaatgagcccaaaacgtttccaaaaagccgcatacaaagtgaaagcggtttaattacgatttccaaaacattaagcggcgtcataaaagccatcggctgggcaaaaccctttatccagcctccggcgcctttcgcctttatcccggcagcctccaccaaaacaatactcattacggcaagccccgcggtaacatttaaatcctttgtcggcggcgtaagcccaaaaagaccaactatattagaacatccgatatataacaagacagttcccaaataagggatatacatctttcctccctcgcctaaaatcccggtaaagaagttatttatccagccgataaacgtttccaaatatacctgcactccgcttggcgcaagtttcaggtttcggacaaatatgatagaaaacaagacaagaacagccattatcccccaggttataaccacggattccggcaccggaatccctccgaaaatcggaattgtaaaagcaatggttgtttcattcagctttgtataaagttccgctgcaatatcattcacagtctgtcaccgccttgttaaaaatttctcaaactcaaagggtaaaataaaaaagaaatacaccagatgcctctttgcatgctgatattaatttcttttttatcttaaattacttttcaaattatctctcatatattaacaattcaaaagtcatcactaaaaaagtcaaattttataaagcaacagcttgtttgaaaacaaacaaaactgttcgaattcaaactctttacttgaagatagtatattcccatttttttgaattgtcaatcttaaaattaacaaatatgtatatagaatacaaaagaaaattgtcacaaattcctttaaggaattattttatatcgtgttgatataattctattattttaacaaaacagccagttccggaacgttctttttgatttcctcagtaacccaaaaggctattttgtccgctccgaaaatattcaggtgagtatcatcatcatcgccgttttcgtagaactgtgaatttaagaactcagggttatacataaacctctcatcatgaggttttataattttatataagctctttgcttcctcaagaccgacctcgtttatccagtcatttgtcctcttatagacatccagcaccggaatattcagctcttttcccagttctttagcggcattgacatattcttcaaggctctcgtctgaaagcttccgtctgctcactgaggttgccaatatcggaattgctccggcatttctcgcaatatttatatatacgctcatataatttttatatgagcctttttcatcaattttaccaaacgccggagcatatcttgacggatcctgtattttagaatcattatgaccgaactgtaatatcagaaaatcgccctcgctgatattgtccttaaagaccttaaaattatcttcttctgtgtaactctttgcgcttctgccgctcatggctatatccgcaaccacggctttatcgcttataaaatacttatcaaaatactgtgcccagccggtttggggaaacctgttgttttctccgctgtgtggatatatgcttgcagtggagtcgccaataacaaaaatgacccgtcttccccttctgtcgattatatttgagtttttctcctgcctttttccgctgcctttcagaacgttaagcacaaaactcttgtcaatgtttatttcaggataatcctgatacgaaaaatgagccgttatagtcacattcttctcctcgggcaggcaaattacctcgcccgatgtggatacagaatccgggtctgaacttgaccacgaaacatcggcataaccaaatttagtatttctgccgtcccagaggttaaggtcgctgcaaaccctctcctcacactcattttcaagcttgacctcggcaaaatcaatgttttcaatctctgtcaataacgctttgtattcctcattactatactttttcacatctttcacctctaaaaattttttcagtgttacactctatgattaacattatatatcaaatattttatttactcaagtcataacttaaatctattaaattatacagctcatctattgaaacagaaccgtccagcaaaaccgtaatccaatgttctttattcatatgataagccggaaaataacctttttctttaattaaagaacctattaaaacagggtcgcattttaagtttataatattcacaatttcagagttattcagccctaaactggttttcaccactgtcattaacaaagcgaaccatttcgcattgtccttatgccttaaaacagcgctttcaggtgatttaacccacggatagtcaggctccgcgccgtatttttgtttagcatacttaaaaatatcctgcttgtatctttcagcagtatcttcgcttcctcttatcattttactccccttcttctgataaagactgataacttccgtaaaattcaggtatataacacaaatcggacgagccttcttcctgaacatagacattttccattcccagggacgcgcagtaatctaccaaagtttcataatatcctttcggcaagttcctgttaagctcatccatacctctcactccgggcataatggtatactggctcatcaggcttagccaaattttgtcctcatatttttcaaacaaatagtcaactatttttttagcctcaaaaatcagaccgggcaataacatatgacgtactatgacccctttttttataagaccgctgttgtcaaattcccacttgcccacctgcctgtacatctctgaaacggcttcggaagccgttttaaaataatcttttgcgccggaataacgtttggcgtatttgtctgagtaatatttcatatcaggcagatagacgtctacatacccatcaataagtttcagtgtttcagctttctcataaccgccgcagttatatacaacaggcagattcagaccgcgttttttcgcattgtccagagcggaaaccagctggggaatataatgggtcggagtgaccaaattgatattgtttgctcccttatcctgaagttccaaaaaacaatcggcaagttcttcatccatcttttcaagcccttttccttttgagcttacatcataattctgacaatacacacatcttaacgtgcagtttgaaaagaataccgcaccggaaccgttttcacccgatatacacggctcctcccaaaaatgcaaatcagccctggctattctggctttggctcccgcaccgcaaaagcctgtttcgccgctgagcctatccacaccgcactccctcggacacagcctgcattcgctcaaaattttatataaatccatttgtacacatctccaaaataccgccgctaaagcacgctgagcgcatatctgaacccctgactttctacagaggccggataatttatgattaccaaatcatcaaactctgtatagcggtaaaactcgtctattttaaactctcctccgccgaaaccatataagccgttaacatgccgcgggtcgattatataaacaacgctgtagttattaagcgcccaggcagaaaacgcgttgccgtacgagtccttaataatacaaatttttttgccgttatcaacattcgttttaaatacggtgaccggattgtctccgccaataaatgcagaataagagtttatattctggtctaccggcacaacgttcatcaaataatcacgcatatgtccgtcacggtacaccgccccctcggcgtttactttaggcataaaccgctccagcgtttcaaagttgcccgaaattttcgccagctttcccttttcatcatctaactctgtcaaatacttctgccaatatccaataaaataatcaaacttcatattctgaaaactattaatatcgtcagccgtttcattcttgcattccaaaaacgacttataggcgtagtacgcccctctttgcgtccaatggttatccgtcataaaatacagcttttctccgccatgctcatataaagctgtaacagcgtctataggtgtgacccagcttttcaggctgtcataaaccatagacagcccctcaatttggctcctataaatttctttcggtgcataaaactcgctcatagacggcacaagcagcgaatatgtgtcagcgagcggaaccttttcggctatgtgatttattatttccgcatattcttttgcatttttctcggaaatacttatatcctcaaaaccaacgttgcctacaacatgcagtcccggaaaactttcaacatcattatacgccatgcggtatcgtccgtcaatccaaacaccgccggacttcagcggattaacagccggtctgttattaaactgcgttctctcttccaacgcagtctccccaaaattcaataagatttttgccgcgcttgaagtttgactgccgtcggtaacacgaacaattttataagcgtcaaagtattccaccttgaaaccgaaactctcggcaaagaatcttagcggcagcattaatttttcatcgtttatatagcagtttacagcgtctttgaccgctgttccgttcacgtaaacaggagttgaggctcccggaaggattgttattattatatcccccttactgagggttgcaccgaacacagtttcgtcccaaaagatttccgcccccacgctttccgccagctcacggacaggaatataagtaacgccgccgagtatttcggcaggcgcggcaagcctgtcatcgtttacgactatcataacatagtcggtttttaccgcataagcggagaaggacatacaaagcgaaataaacactattattaatacgccaaaacagaatttatttttcatataatcaccgatataacaattttacaaattatgattaaattcacacaataactttatcacaccggtcataaaaagtcaacgcactatcatattaactaaacggattttagcgatgggatttattcttttcgcgtggttattaagatattgagtccgtcgttttccataataaaatcgcagctgtttgacttctatataactttctgaaaatttatcagtttatctaaatataagtacaaaaaacttgttaaaattaatttaaacaattccggttaagcaatttttaaatcttgacaatttacatcgataagagagtatattaattaataatagaaatatttctgaatatctacacaactaagaaatttaatatttatctataaaatatttttaacagacatgtttactaatgactttatagtaaatggggtagtttcgcttagttttgcgagaccttttacattactgactgctatattaaaattatgtgatggatttttcatattagaggaagtataaatttttaaatcatttgttctaattaattccgctatacaaaaatttaaaatatcagaaacagaagcatcataagttaaagaagcttcttccaaaaagttatataaatcatcttcaatttcataagttttacgtattcttttttctcttttagagaatttgttatttaaaaatttattattcatcattcgttatgccccttttatgacctaatattacaataatttataagatgtcttttttcatccttaccgtattatataatatgttgtgatataagtcagaacaaactagataatttatatctaaagcagataaagtaataaaaattttttataaatattcaatttaatttaactattccaggcaaaactcacttaatattgagttcttactcctaccaaaggcgttaaacgtttcaatagaatggttataaagtaattgattgtttattactctcttatttttacaataacatatttattattaataaaacattcactaattaggtaggtttagcaagcctcggtagggaggactttgtcctcctcgtgaggtgcgcagccgcggttatatataataattataaatatcgtttcaccaaaaacacacttaattattctataattgcttactttgatgcgccaggccctgtttcgcccgccgagcccgggcgagatcgtcttccctaaaagggaagacgattaagtcaaacctatataataacatttataacaaaaaatgacgctatagcagttttagctgctataagcgtcattttaaaatatattaaaatattatcccgattatctgtatgagtagccgccttttatcattactataacatcattactggctgtgaaacctctgccgtcgttcaccggaacaatcagcatatgattcgacggcagctctgttccgtccggcaagtcataaccataagtcgtgtcggctattccgcccttctctgtcccgattaccacaccgcttccttttctcagaataaattctgccccggcgtcaaatataaccgtttgtcctgcatccacatttacaacagaaaacttctcagaatatgaatccgaagtcccgcctgacatcttctgctcaacgtatgctttaagctgcggcaccaccacatcaactatatagctctttgtaaccacagggtcgtctgtgtcccccggctcagccaataccagcgttgcgcccaaaactgagagaatcgccgcaactgcaataatcatctttaaccacttatttttcattttcacgcctccttttcatatgtgtatataaccgccgttcattttttattaatcctccaaaccaaagctgatgcttatggcatggttaacacggttcatcagtccatcgtcaagatgaccaattttctctttaagacgttttttatctatagtcctaatctgctcagccaaaacaaccgagtcctttgacagcccgtagccgcctgcgtccagttctatatgcgtgggcattttagctttattaagctgcgacgttatagccgttgcaataacggttggactatacttgtttccgacatcgttttgaataatcaaaacaggccgtactcctccctgctctgaacctacaacagggcttaaatcagcataatatatatctcctctttttactaccaaatcaattcacactccgcaagttaaattcccgtttatgtctttggtaatattttatgctgagagacctgtttttgttctgtgctgcaaccggacaacttgcggtaatgaacggttgttttatgtacaggtcaatctttgaaaggactgtccaaaaggtaattatgaacgtctgcgaccttgccgcccctcatatataccctcggaattctcttaccaatgacacaaaggatttcataatttattgtccccataatgctcgctatattctcaatgggtatttctgcgccctctgagctttttccgaacaatatgacctcatcaccgatatttatattattaacatctgtgacgtcaatcatacattggtccatacaaatatttccgacctgcctgcattttttgccttttactatcatttctgtcttatctgaaaggattcttgagtacccgtctgcatatccaataggcacagtagcgatttttgtttcattattttttgttttaaattttctgccgtagcttacagacgttcccttttcaaccgtcttaatattggttatctgagccttcagcgacatagccggttttaagtttaaaatatcttttgatacaaaatcactcggcataagcccataaagtattatacccggtctgaccatatccatgtgaaattccggaaacctcatcagcgccgcgctgttacagcaatgacacagcggaacttttacccccgcttcccttatcctgctgcacaaggtgttaaaccggttatactgcagcattgtatactcgtcgtcgtcatcatctgctatggcaaagtgggtaaacaaaccgtctatttccaaatacggcaattttgaaatttctataatttcatcaaccgtctgcttatttattttttcatcctctgtgtatctgaatccaacacgccccataccggtgtcgattttaatatgtattttgccggccttattcagcttggctccggcgtttgacatcgcaacagccaactctttggtataacaattcggcattatatcgttttctattaactcctcggcatatttagacggagtatttcccaaaatcaaaatcggggtatcaataccgcacagccgaagctgaatagcttcatccaaaaaagccactcccagcgaatcagctccgttttcaagaagcgtttttgcaacctcaagatagccgtgtccgtatccgtcggctttgacaactcccataattttaggcttatcaccgacatgtctgcgtatctcttttatattattttcaattgcgtcaaggtctatctcagcccacgcgcgcttttcagtaaccataattttctccttcaaaaaacatctttcaaattaaactgccgtgttcaccagcctaaaagcctccggtaacatttcaaccaaatcagttgctataagcccgtgctcgcccttgtcacgtcttgccaaatccccggccgctccatggagaaacacgccgagaacagccgcgtcgtaaccgttaagcccttgacccattaacgagccgataactcccgacagcacatctccggtacctccggtcgccattccggcattgcctgagttgttaatatgtacgccgccgtcactgttggcgataacagtgtcctttcctttcagaactaccgttacgccgaactcctcagcaaaatcacgagcgattccaactctgtcattctgaaccgcctcaatgctcaagccgcacagccgcgccatttctcccggatgcggcgttatcacaacctggcacgattttctgtttttatgctttcgcaaaatatccaaatctcgtgaaatacagttcaaaccgtccgcatcaatgacaaagtccgtgcttccgctcagaagcgaatctataagcttaggaatatcatcattatccgaaagtccgggaccaaaaacacaaacgtcacttttattcagtcttcgcttgatttcgcccagagcgtcgagacttattgtgccgctctcctccacctccggcaaaggaaccgtcattgcctcagtgagcttaaccgccataatctgctgctgtgattcgggaactcccaaagtaaccaaaccgcttccgcttctaagcgctcccatgcaggacaaatatgcggctcctgtcataccgcggcttcctgcaataataaacaacttgccgcagtcgcccttgttagagtcttcattacgaaccggaataaggcttttataatattccagtccggtataaaacggaatccccattcccgggatatcctcagatatatataccaccgccaccgcggtcttatttgaatgcgagatacttaatgcggcgttaaccttcattcctccgaatttaataaacggctttccaagctcgtcgtggcagacctctatatctgacagcgaaaatcccctgacgccgcttcccagagcttttgaaaaagcctccttagccgcaaagtggccggctatagattcataaaaacctttagccgcagacccttttgagacaaaataatccgcctcgttttgggtaaacacccgccttataaacatttcaagatttttcatttcacgaaaccgtgaaatttctataatatctattccaatcatataattccgcacctttgacaagcataatttttagtccagcacaaccttctgcggattaaactttttaaaaccatcacggattttctcgttagggttaaataacagcatctttccgcttccgttttcattatacactgcaaaatacaattcactgctgtttttatcaacacaggcatataccttttgataagactggttattcatatatctctcaaaatcaggatgagaacgcttcgccattatctcaacctctctggcgttgaactcggtcaaacgttttctctttctgacattaactatagcgtccacatcaaacgagccgttggtaaaacaatactcatactctaaatttactgatgttatcagcatgtataagagataaatcagaccgcacgcaactataaaaattataaatcccataagcggtatagaaaacatcagcgcccctaaaacatatataactaaaagagccccgatgatacctgccaaaatgattaaataatccttgctgtcacgttttttctttaccaattgttccacaaaaatatccattaaattgcctcctgtttgtgtttcatattttatcagacgaatgttctgatgtcaagccgcctattcggcaataggtatgttctcagcgcctataccgctcacgccgctcagtttcagtttaccatccgcatcgtcaccgacagcatatattgttccgtcatagttaagtcccagggtatggctgtttccgcaagctactgacataacatttgcccaaagcgaaacagaaccctgattcttatcgttaacacccttagaactcgtctttccgtcagcgtttacatagacaatatactgagaaccgactgccgccgacactatatttttaactcctgaggtatcacactggcggtagctgttatcaccgacagccacaacagagccgtcatattttaccaatacagtatttttttctccggtcgctataaatgcaacatcgctttggcctgcaacgtcacactgtccatggctgttccagccgacagcaagcacagtgccgtcgtttttcagacctatcgtgtgattgcctgacactgcaatctgaactatatcagtccattcctgaacatcacactgaccgtacttattgttacctctggcaataactctgccgttagctttaagcgccacagtgtgtccctcacctgtggcaactgacacaatatcagtccagcccgacacatcgcactgaccatactcgttgttaccgactgcaataagatttccatcgtatgtaagtccaacagtatggtttccgctgaccgaaactcctataataccggaccaatccttagtttcgcactgaccgtagctattatccccgaacgacaaaacctcgccgtttttctgaacaactgcgctgtggttgtatccggccccaatcaatctgccatacatattcaatatttttctgacgttaacaacactttgcttatattttccgcttttatgaaaatattttaaggctttctgatattcatgtatattcatataagccattgccgttgaataatcaatctcatgtttctctgtgccgaaatagacaaactcctgttccagcttttcaagagtgggcgcggcgttctgaaaatcacggtttatataataattcattgctgttttatagcaaagctgacgcgccgaaaaatatttctgaactcccattccaacgaacgccaatatacagcatccaacaatgaccgaagcccaaattataagttttttgttggcagacattcgctttttcagttccgttttttctttggtatccttgatagctttggtcagtctaagcctcagccagtcctcgcccaaagcatcctcggttactatatcattatcaagtttttgctctgaatttatccaaatgcttccgtcgtcaaacaatatttttgaaacctcaacaaaaacagaacaggttatatccggaacctcaaccgtttgagaattaccaaacacagcgttgggttttgcgtcaacatttatatacggaatatttctaagctgtacacaaagattaagctccgaatcaaaacaacctgcattaaaatataccgacttcaccgtttttccgcagttattatatagtttaagcttcatgacggtctttttgctgtcgcgcagtatctcgcttgtatcaatatataccggagctttgccgcggttttcatattctgtacgttttaccactttatatgttttttccgccatataatcacctttatcaacaatctatttatattgaaacaaaataacataattatacttagacattatactacaaacttcagcaaaatgtattacaacactgttaactctgttatacaaatcaaaaacaggcatgcaaaatatatcctcagtttccattatattattagcctggaaatattgagtaaataaaaataatatgatataatgatacaaaaataactgtaaaggatgagagaccatgaatataacagaagcgataaaaaacagaagaacaatcagaaagtttgaacaaaagccggtcagtaaagacgacttaataaaacttatcgatttaaccagatacgcggcatatggagcgaacctccagccgcttaaattcgcggtaatggataatccggatgaaatatatccgctgacacgctgggcggcatatatgacggaatgggaaccggcgccgaacgaaaggccgcttcactatatagccatactcggtgacacaagcattaagaaaaattttgaaaccgacgccggagcggcaataacaacaatgatgctggcggctgaagaaatgggactggcaacctgctggctaggggccatagacagggacaaaattaaagaaatgctcaaaactgactatcaggtattatatttgcttgccgtaggctatcccgctcaaaaaagcaaaattattgatattgaagacggcagcataaaatattttgaggacgaaaacggagttataaatgtgccgaaacgttctcttgacgaaattaatgttaatatatagttaaggttttgagactaaaacagcttccgcttttggaagctgttttataatagtttaattaattattggaaaatattacaataaagcgagcagaaatgttaataacatatatgataaaatatagtgcagcaagcatcggcagagctgtgaccacacttttttaaagtgtgtgtgatacaaaatggcttgattgataaaactaaatagtcagacttagttgtgatgtgcgtacgaagtacgccgcgtgaggcgcgcagttgcagaaaagtatattataaaaatgtttattacaaaccatactaagtattcgcgcttcgcgtgtggaaattcacctaacgcggcgtgtctgcaagctatacatcacgattaagtaatttattatatgacaactaagttaattattggcatttatagtttgtatgacatacacttttaaataaaagtgtagccaaaatttacattgtaggctaaccaaaacaggccactttgtatcacaccccattccaggcggggtcacagtcacagctactagcgttcacaaaaaacaccttgaatttttctgtctgtttatgttaacattccattttcttcatggatataataatagttgctgacgtaaaaacacttctataatgaacacaactatggataataagattatattcaaatatgtcatttaatatctgtaacgatttactcctaatcagaaacaaatttctattaaacaaatctacactctgtctttcttaattcacattttttaataataatatttcctgattatcaatttaatctattgaacagaacttacatcatattgcatatattgctctccgtccaatgtcttccagcgaaacactccgtcctccaaaatcatataagaagtcttactgttttctttcggaatcgacacggaaccgggattcatataaaaatatccgcctttatccacacattttggaacatgtgtatgaccgcaaagcaaaaactcgccctttttcaaagacggcggattatcctctccaaaatggtgaccatgggtggcataaattgttgttccatccacagaaagcaaagcatactccgccattattggaaaatttaaaaccatttggtcgacttcagtgtcacaatttccccgaacgcacagcaaattttctgacacgccgttaagcatagcgataacgagttttgggtcataacctttaggaaggtcatttctggggccatggtatagaatatctcccaggagtaaaagcctatcggcttcctctctgtcaaatgctttcagaagcttgctgcaataatattcagaaccatgaatatcgctggctatcattagtttcatatatatcaaacctttctatttttatattttaaaagaatctttaaaacattttagcacaaagggtttaaaaatacaagaattaaagtgctaacgattaatttttagtcaacagttttaatcatcagataaaaatacaatgtttcaacgaaattcggcagggcggcacagccgccgcgttaggtgagttatcatcgcacgcttgcgtgcatatactattttactgttttactgttttatattaacttttatttttaatatataccgcgactgcgcgccttacgcagcgtacttcgtacgctctaccgatgcttgcctcatcattggctatttattttttaacttgttaataaaacctataatcaacaatatactgctctcatcaagtccttttaattcttttattgctttttgcattaaaattggatattccgcttcctcatcaaaaaactccttcggtgttaatccaaaatattcgcaaatatatacaaattcttttattcattaaaacaagtttatttcatacttaaaacacaacgtttcaacgaacttcggtagggcggcacagccgccgcgttaggtgagttatcatcgcacgcttgcgtgcatatactattttactattttactatcttactgttttatattaacttttattttcaatatataccgcgactgcgcgccttacgcagcgtacttcgtacgcacatcacaactaagtctgattattgacattgtaggtatatcaatacaaatcaatttgtattacacacactttaaaaaagtgtggtcacagctctaccgatgcttgcaataaaccccaaatatttatatctaatttttgttcataggtatattaggattgtattcaaataagtcgcttggtttacactttagtatttgacacattgcatctatgttgctatattttatagattttgtctcgttatttaccatcttactaaagttttgataactcatgcctaattgcttatataaccaatattttgtatgtccgcaatttgtaaattttaaaccatttaaattcaaaaatataaattaacttacctatgagataaaagtggttatttcaacgaacatcggcagggcggcatagccgccgcgttaggtgagttatcatcgcacgcttgcgtgcatatactgttttactgttttactgttttatattaacttttattttaaatataccgcgactgcgcgccttacgcggcagactacgtctgccctaccgatgcttgccgcatcatcggctatttattttttaacttgttaataaaacctataatcaacaatatactgctctcatcaagtccttttaattcttttattgctttttgcattaatattggatattccatttcttcatcaaaaaactcttttggtgttaatccaaaatattcgcagatatatacaaattcttttatagacggtaaagtataaccggaggttattttatttatatatccctcacaatgccctaattcaaaacttaattgccgctcagataaatttttctctattcgcaacttggttattctatctcttaaaaatttttcataatccttatttccctcatacatggcaatacctcaaaactattttatatttttgtctcacataatcataatacaaaaatataatcaatatatagactattacattagataacctataagtctatacattcggaattttcatctgtaatccaaataaaactgtacagttttaaggattataaaaaatataaaacttctctaacaaaaaatttatttattataaaaaatcacagcataaaaaaatgacccgatatatcgggtcatttttattataactaactatttcgtatagtgaaccggagtccaatccccaacataatcctcaacggttggaattttttctgccactccgtttggattatcagtgccaactgtcaaatcagttgtctcacctgcattgtgaacatagtttatgaacactctagataaacttaattcaccgcccatggtagcccagctgccaggtttttccactccgtcaagagtcgtgttattaaagaacattgctgaattcgctccgccccagtttcttccaaaatcaccttttgcaaatttcataccaggcatactattcttcttaatagtacaattattaaagaaatatcccggatccgttactgatgatgtcttagaagccgcaatatgacctccgctctcaacatctgaatatccataccaaacaaggtcgcagttttcaaacgccacactgtttccgccgaatatataatctgtgtttccatagatttcacattctttgaaatatcctgtggagcctgtatacaaagtatcctgacttgatactattttacaacggtagaattccgagttcatgccctcagtagctaccgctgcagctctttcggttgaattcttggtggtaacgtcaacgccggcttttctctcaaacatcttttcattcatttcaacaccgtcagccaattcttcttctgttacatactggttgaacgtgttctcaaaatcaatgttctcagccaggaatcctgaacccttatctgttatataaagggttggaccccactttgaagctacacccttagaaatctttgccgcagcatagtcagcattatagaatccgccgtttaatgaataataaacatatcctatgccgtaataacttgtgataattggtctgtttgattcgtcagcgctcttcaaagtaatattgctttggtcgataataacctgacctttatatgttcccgggtcaattactattgtaaccggtttgtcgcctttatcagccatcatgcgaactgcagaaaccgcttcattaacggttttatattccttgtctgcacctacgtataatgtatctgtatacggaacatccacgtcgttctttataagaagaacatttttaaacggattttcatctccgcccggaagactatatgttgatgacagatttgataatgtatatcctgacggaccttccactactgttacatcatacacttcgtttgttaataattttgcgacaaatgtaccatcgctgtttacagttacttcgtcataaggcgctgcttcaccctgttttgtgaacgcaatcttaacagcgtcagaacctgtgtatacttcattctgatttctcatatcatcagaaaatgttgtataaagtgtacctgtaacctcaacatcttctatcttaacaaatttaatatcgtgagactgttcatatctgtttttattcacagtaactgtgtttgacactgttgttgggcaaacgctgtctactccctgaacagatatactataggtttcgccctttgttaatgttgcctgatatgtttctgcataatcaactgtcacaacatcagtgttgtcattaacatttgtgaaaactattttagcagcgctcaggtcaagacctgtgctgtttgtcacattaccggtaattgttttatcaggcgtctcgtcgtaatattctataaagacagcatatacgtttttatttgagcctccgccgtaagtgtaaaccggtgacaaatcgtctttgctgacatcagctgtaacggttgaaatgcccttatcgcatattgccgaacctataacattaccgctctgcgaaatatactgtgttcttccttcaccgccgtttccgtcaaatacgactgttaccgtacaagatgtttcaggagtaattttaacatatctatttgtttggcttcccgagccggcttttaaagatttagtaaagttatattccactccgttagtgtgtgtatacttaacattcttgtttctttcaaacacctgattaggaccaacctctgctactcctgcagcaacggcttccgcaccgttatttgcagaataagcttctaacgcctgacttacttcagggtcgtcaactctccaaataatatcattaggaaggttaggattaggtgtagcagttgaaactgaagggcttgcagatggctccgcaggtgtcgctgtcggctctgacggagttgaatatacaacgcttactgttacatcctgatcaggcataacaaacgatgcgttagaaactgtgatattgcttccgtcttttcctgtaaccgttatattagccacatcgcctgtattattaggttttgtattaactactactgttgcacctgttaaaaattcatactcgttcggctgtaatgtcggagctgctgtaggatctgctgttggagcctctgttggcccagctgttgcgcttggctctgctgtcggtgcttctgttggtgcagctgttgcgctcggttctgatgttggaacatttcctgctgtagcagttggctctgccggaatatctccgtcaggtgttaccgcaactctaacatagttgaacggaataattggtgcataaatatatacttcagttccggcttcaattactccctcggttgttccggaaacgttattctttccgtcctcggcggtactcgtcaaaacatttatgtcatcaccgtctgctccggctcttacatatacgcttccttcatcggctgttctcattgtaaatgcttcaaccgttactcttccggtaaccggcattacaatttttaacgctctgtatgataaatcaccattaatttcaccggctccgcgcattaccatatcaaagtttaacccgatttttattgtatttgatgaatctgcaaacactgtcaaaccctcgttgctgaatgattctccaactgttatctcattacctgtgaggttatcaaatgtccactcgtgaacgccttcttctgtaacattcttaataatatgagcagaatattcagaatcctctgccagtacagcttcgctgtctgctgtaacagcttttgaagtttctaatgttcctgttccgccttctacattcaaaactgctttatggcttacaggttcaggttttggcgttgctgtcgcagcagcttcaccgaattgtgcgtttactattgtgtccgccgctggcatctcaaaggtgtagtaaccctgatttcctgatacttctgtaactgtcgtctcaggagatgtaaacacctttatactttctgctgaagattctgcaaccgctttaaccgttactttatctcctgcctttaatccatcaagactgtcaaccaattcttctgtttctgctgctgcagcctctgctgacgctgctgatgcagacggttcatatgaatatccatacagtgtgcctgttgttcctctagcccacagcaaatattcactgcctgcactcaaatcaaaggtctgcgttccaaatgcgtaggtcttttcatcatttatttcaggcatttccataatgccgcttacctggctatatgaaccattatcgttttgtgaaagcttaatatccttaccatcgcctgcgctcataacgtcaggatcgccgtttgttacctgtcttctataatagattgtaaactttccgtcttttttaggcgctattatcagcgcagtgcttccgctttgctcctgtaaaggctctgaaggatttgccgccaaacggacttgcatattatgagtaaacggctttccgcctatcattttggtagcgggctcgttattttcagtatattcaactattgttgttccaaaagttccggtaacactgatattatcatcattggtatataccgaacctgccgcagacggcgtatcacctttaactacaaaatctgttgctcctgtcacaggggtttcaggcgttgctgtagccggtgcgtccgttggctctgttggttccactgtaggtttagaaggttctgcctgtttaactatcttcaaagaaccgcctgtaataccctcagctacttttactgaatatgtaacatccggattctgagttggcgttgctgtaggtacagcttcgcttgttgccgtcggtacaggtgcagttgtagctgttggtacaggcaaagctgtagctgtcggcacaggtgcagccgttgccgatggtacaggtgcagctgttgccgttggttttgatggatcagctgtcggagccggcgaacctgttactgtcggagttgaagtcggcttagtcgactcaatatatccggcatagaagctcattgcttttgttatctttgtagtgtcaaaattaaacggagaaatagtatccgccttatctgcctgttcctttgacaaataccagcctacgaattctttgccgtccattgtcggatcagccggtctcttggctgacgacagatatgtattttttgttactgaaactgacttatataatgaagatccgttatagaactttacagttactgtgcttgccggcgagccgttactgccgcttccgcttccgccgttgccgcctataattgtgttattcggctttgtttcatcgttaggattcacaacattatcagtatttgatttaacatttgcatttgcggataaattaactacatttcccgaaatctgtgaacctgtaattgtaacgtctccgctcgcctgaccggacactacaacacctttagcaacaataccgctcaaagtgactccaccggtctttataattatcaatccacctacatactcagggccatatgttcctgcctctgttatatacagctttatcatattgtctattatctttacaaactcggctcttgatatatagtctttaggacggattgtaccgtcttcataaccgcctatataacctgatgatgtcataacgccaacataaccagttgcaaaatcagaaatattttgatagtctgcatattgagttattccggcatttgagttctgcacctgaagtccaaatccacgagccagcatagtcatagcttcttcacgcgtcatataattattcggagacattgttccgtcaccgtttcctgtcagaacgcctgcctcaaccaatctgagtattgcatctgaataccagtcgcttgccgcaacatccgtaaatgtgtttgttgccttatttacgtatcctattaaattctgggttacctgtgcaacttcaccacgggtaatcgcatcgtccggtctgaaatatccgccgtcgccttgtattacgccgttatctgaccacttattaatataactctccgcccagtgtccctgtgtatcctggtactcagcagccgatacgacagtagccattccaagcgtggtcataatcatagcaataactaatattgccgatattccacttcttaactttctcatgttctctcatacctcccataaatattttttattttagaaaaataagatatacaacttatagttattgtaacatcttttggtcgcaaagtcaatattttatagcaaatcacttataaaacatctataaacatacataaattataaaattcaacaaaatttgttgtttgattacttttaaacttagtttagctatataaaaatcaaaaacaaaaaactgcagcttatgaatcagccgaatatttctgttttacattaaatataaaagccagttatataatattttatttatataataatgaaatttcatcttataatgactctcaactattgtgtaataagttttaatcacggagaaaatcatagttttcgcttatcactcatttttatttcagaagttttcaacacaaagctttataatatcggcgggaattggatgaaatttgtttagtttaatccgcttaatacagactaaaccgtcaataaagtccgtattaatgcttatccgacgtaatatactcatataaaccgaacagttaagagtcacagctttgcaatttatataaaaagcgccttgccgtttaataagcggcaaggcgtttaaagttaaattttgattttctttcaatacaacactataatttgacagaaaactcaaataaagcgattagcttcttattttatttccgaatgaagctgctgaagcgatttaacctctataacttttttattctttacttcttttataccgctcgaagccgcttttgccgctgccattgttgtcatatatgaaatctttcctttgattgcggcctttctgatataactgtcatcatggatacttgtctgacctgccggagtattaattatcatttgtattttaccgttagttatttcatccagcacgttcggtcttccttcatggagtttattaatgcgctcagcaggaatcccggcttcttttattagattataagttccgccggttgcgataatttcaaaccctgcgtcatggaaatcctgggcaacagaaactacctcttttttatccttatcgttaacacttataaacactcttccttcaagcggcagtctcgtttgagttgcttcctgagacttatagaaagcttctccaaacgttccggcaagacctaaaacctctcctgtagacctcatttcaggtcctaataaaggatcgcactcctggaacatattccacgggaacactgcttctttaacaccataatgcgaaaactttccatgtttaagctcgtccagcggatacggctttccggtaagttctgccgtcattatctgagtagctattttgaccatatttatattgcacacttttgacaccagcggaacagttctggacgctctcgggttcgcctccagcacataaacttttccgtcctcaatagcgtactgcatattcatcagtccgactacgcccatttcctcggctatcttctttgtatattcatttatcgtcttcacgttttcttccggtatatttagagatggaagtatgcaggctgaatctcctgaatgcactcccgcaagctcaatatgttccataacagccggaacaaaggcgtgttttccgtcagaaattgcgtcagcttcacactccatagcgtgatttaaaaatctgtcgataagtataggtctgtcaggcgtaactccaacagcggcattcatatagccaaccaaactgtcagaatcatgcacaacctccataccgcgtccgccaagcacataagacggtctcaccattaccgggtatccgattttttcagcgacctctaaagcttcatccacatttacagccatacctgcttccggcataggaatttccagcttgtccattatatttctgaacctgtccctgtcttccgctaaatcaataacttcaggtgatgttcctaatatttttacgccgtttttctcaagctctgccgccaagttaagcggggtctgtcctccaaactgcgcgataactcctattggcttctctttcttgtatatgctgagaacatcttccaatgttaaaggctcaaaatatagcttatccgacgtatcatagtctgtagaaacagtttcaggattacagtttactattatagtctcaaagcccagctctttaagggcgagcgccgcgtgtacacagcagtaatcgaattctataccctgacctattctgttaggtcctccgccgagtatcattatttttttgttctcagttacttcattgttattttcactgttataagtcgaataataatatgcgctgtccggcgttccgctcacatgtattttatcccaagcctcttcaaccccgatttttattctttcatttcttatttcatcttccggtacttccaaaattttgcttaaatacttatctgaaaaaccgtcctttttagcctttgtcagcatttcggaagacggtaaatgtcccttttcctttaagagcgcttcttcttcatcaacaagctctttcatctgttcaataaagtaatgttttattttagttaaactccaaagttcttcaacagttgctccctttctaagcgcttcatacattataaactggcgctcgcttgttggatatgcgagcatttggagcagctcttctttggtcttatcatgaaaatcattggcaaatcctaagccgtaacggcctgtctcaagacttctgatagctttctggaaagcttccttatatgtctttccgatagacataacctcgcctacggctctcatttgagtcccgagcttatcctcaacatccttaaacttctcaaaagcccagcgtgcaaatttaattacaatataatcaccgtcaggaacatatttatcaagagttccatactttccgcacggtatatctttaagagtaagccctgtggcaagcatagcagacacaagcgctatcgggaaaccggtagcctttgacgccaatgctgaagaacgcgacgttctgggattaatctcaataacaacaattctatcgctcacagggtcatgagcaaactgcacgtttgttccgcctataacttcgatagtttctacaattttatacgcctgctcctgaagccgcttttgaacctcttcgggtatagtaagcattggagccgaacagaacgaatcccctgtatgcacgcccagagggtcaatattttctatgaaacatacggttatcatattgttttcagaatcgcggactacctcaagttcaagctcttcccagccgagaatagactcctcaaccaaaacctgtcctaccaatgacgcctgaagacctcttgacacaacagtctttaactcgtcaacattataaacaagaccgcctccggctcctcccatagtataagccggacgtataacaacaggatatcctaactcctcagctatagctaacgcttcgtcaactgtataagcaacagcgcttttagccatttctatacccagcgagtccattgtctttttaaactctattctgtcttcaccgcgctctatcgcgtcaacctgaacgccgataacctcaacattatacttttcaagcactccggcttccgcaagttcagaacacaaattcagtcctgactgaccgccaaggttaggcaacaaagcatccggacgctccttttctattatctgtgtaatacgctccaaattaagaggttctatataagtgacatcggccgtggtcggatcggtcattattgtcgccgggtttgagtttaccaaaactatttcataacccaaatttttcaaagccttgcacgcctgagttcccgaatagtcaaattcgcaggcttgtccgataataataggcccggaacctattatcagtaccttatgaatatcgtctctttttttcatcttatttctctcctcttttattatattttccgaaaaaccggctgccgcaaaaactctgtacagcaaaaatacgctggaaacagttacttttactttagcaaatagaagatttttcagttcgttatggagcgcgataaatcaaagcgctttttgctctttatagatttacttattagttaatttcaaaactatagagaacaaaaatttcttaacttatataatatacaaaattcatcaacaagtcaacaaaaaggacaaattttttcaaaaaaatatttatctgctaaaatctcctgtttatgtaaatgttataaatttttatcgccataaatttttaaatttctttttacttcctattatatttgagcggacaacttgaaaataacaaagattttaaattaatatcagtaaaactttctgcatatttcaaactcaaactgactgaagcaattttttcatttcacaaataccttttttctgagatttaataattgcttcaagtatcggaacgagttctgaacaaatatcataaagcaacgcgttctgagacatgcggattgctccctcgtggtgcggaatcatctcacgaataaagtcagcattgatattatttgttgagcaagcatttttcatctgagtaaacatagtacaggttatctgactaaagcctttttgatacaaacacaaatctaagggcgtattatcttgttctccgcattggcaaagtatgtttttcatgttatcaatactctttgtttgttcatctataatatttaacgctatattctgaagcggaacgcaggtggtatactgcaaaagattttcagacatttctattgccgccaaatgatgaggaatcatttgaacaataaaattatgagaaaggctatccgtcaactccgcctctgtcatattctcagtcatttgttctaatatctcataaaaacgacacaaatacgctttagcaacattgcttaatttccgctctgccatatttaaacccccaaaaaattaaattttaactatttacattttatgagaagatactaattatggttcctaacataaaaatctacagacctatttacaatacttacatgtttaatttacagtgccataccttacacctcaacaaaccctgttcaacattatatttaattattcaatctttctgacttatatcacaacatataatataagtttttagctgatttaatttttataatctgtcaatcgactctataagaatattaattttatctccgtaaaaactatctttgaggtgaataatatgtatgaaaatttaaatcagcttattaatttaagttccagcagcaggtcatattttttgtcgctccctgttaatatacaaatgaaactccataattgttcagaacatattcatacggcatatgacttacacaaatatgcagatttctactcagataagttataaattatttgagtgcatttattaatctaaacccaacattcaatgagccttactgctgaatccaaagtaatcattctattaattgctggaataataaaaaaacgtgttttacctaacttttttacatttttcattaaatatattttatattacaggaaacaaaaaaatattgagttaaacatttggatatttgaaaaaagtttaatatgataaatcagaaatttataaaattacagcattgtttttatctgatcaaatatccgtatttaaaaaccacataaagctatggtgcgcaaaattttgcgcaccatttttattctaaattattttaaaatcttaaacaacctttacagcttgctgaatattattattaaaacttatactcttttatcttattaataaaaagttttaccgccggagaaaacgtctcatacttctttgttacaatatacaaatcaactgacatttcaggtataatcggacgaaatgtaagattcctgcttccttccgtgtttacaagatttgcaaggcaaagcgcatagcctatatctttttccaccataaatgttgcgttatatattaaattatatgttgcgacaatattcattgatgaataatcagttccaaaccactcaagatcctggtgacccaaaaagtctgattggcaaaaataagaggaagattctttactgggctctgatatttacgagattgaaccgtcagaaccatattcatcggaagacctaaactacaacaatatttcttcaagagcaaatatagagcagagcgacagcaatgcaagaccatctatttcgggaaacattaaaaacttggataaaattgaagaaatgcataaagcggaagaaacactgccgcaggcaagttcaaggtacactttggcagaagaaatgaacaacaagctcactgattattatgaggcagaaaataacccggacacaaatgatacagcagaagattccattgacgaattatttgaaaatatacctctgtatcattacttaaatacggtgtttgcaaaaacagaagctgagtttgaggacagcctaatgaaaggattaaatgcgtcatacaacgcatttatgaatctgccatacacaagttcaatgatgggagacatagctgttgctgaaccacaaaatgcttttgctcatgaaccttacgtatctcaattcaacattcctggtaagaacataaaaatttcagattctcaatttggaaaaaaagttggaaaacatgctgaagactttggtttaaatccaagtaatcctgaaagcagatatttaattagaaacagaataaatgaaatctttatacataaaactgaaattcgacaaggtttatggcgtggtcaaggtaaaacattgccaaatggggcaaatgcctcaggacaagtatatttttatatacaagataaagatgttgttgtaacagatttaaacggaaactttataaccataataaaagaaggtataaatatcccaagaataatagatgcagaaaaaatatggccttaattaagaaaggagatacttaaattatgttaaataacgacccatttttagattttgttatgcaagaggctgaaaaaataggaaagctatttttaatagattcgggtgaaggtaatagttttatagattcggacactggttgggatgtagaagatttaagcggatggcttattaatccatacgaaagtgagaaattcatatcagcacgcaaaaaaggaacattagatattgactttgcaaactcttacgttttcgcaaagtggacaaagtctgataatggaaatattaaaattacatttaaaagatattaaaaactgggacagaactccaattaaatattggagttctgagttctgttaaaaatatgcataaattaattttacttactattattcataattttttttataaaaaacctattaactataagatttgttcataatattttatcctttaaacaatcgcctcattttaaccaattaaaaaataggaggaaaaatatgtgtataaaataattaaaattcgcaattatgcagctactcgagatattgaactacaaaaccataatacaaatacaataaatttatgttttgatgattctgctgttgtaagttataataatttcgattttattgaggaagggacggtatatgattgtaaaatggaactattgggtaattttgagcacacaaaaagtgattctaatgtaatagttactattcttgaatcagatgttctaataagaaatacaaaatatcttaaggtttctattgattcagatatttactacattcttatgtcagacacaaaaaattttactctaaccaaatatatgtattatcattttacaagaatagacttgattcaggttgacaatgttatacatggagattgcatttaattacagtgcggatattataaaaatagtattgcatacaaatgatacagcataaaattccgttaacacattatgggtgacatatcttattatcattacttatatgcaataaaggcgggaatgccaacagagctagatatgcaggaaataatatttgattttacagggtgtaagtatattataaaattatatgatataattcaggaaagctttggctttcctgactggtttgaaaggaattggatgcattgtgggatcttttaagagattacgcagagtgcccaccgatagctgtaaagataacagggattgaaacaatgcctaaagatttgcagaactatatggataaagtgctggaagtgtttatcgatgttcatggtgaagtcccgcagatacattttgaagtaatatcataaagaaaataaaaacggcaagacttaatgagtcttgccgttttttggtgcgggtaaaaggacttgaaccttcacgtctgctgacactagaacctaaatctagcgcgtctgccaattccgccatacccgcatagcttatttattataacaaaataaatatgctatgtcaagaaaaaattttctttttgtttttgagctaaataactatatatttttatatcttattttattccttttacatatatcgtcacatgcttttttgcattatgtttttataagattagctatatataacaattgtaacaccattaaacaaacattaatatataaaaacaatctgaataataagataagatgctgtcttagaacatatcattatataaaaaatatgaatctattaaagattagcatatttgacttttctgcaaaacatttacgtcttatagtatacaactcactctttcataatccaattatctccttcttttattactgtagccgattgacataaaggctgcatagtatttaaaccgctccaccacataaccttaattatttttgccccggttgcctgagcatcaaaattaacatcataaacactgcggttttctgtctcagccgcaggttgactcattgtaagcagtctgccatttgtatcgtatactgccgcaaacagaatctccccttcaaatataagaccatttagttcgattataatattattatcagctacaccaacactttgtattttctgttgaaccgtagttacagaaacttccttatccatcttcgtacggtccatttcaagaacaagaatccaagaagctgcgtcgggtgttgtaagaggccacctaggtatagttacttcaacatcaattgccccggttgtttcactgagcgacgttatctccaacttaggcgaaccgccggttatggttacaagagtaaaatagagtaacttatcctcaaaaaaagaggcatcatatttattcctatcaaaataaagcggtatattgttatagtgatattcgttaatataattatcaagttcttccacagaaaaaactttcactgattgcggacggctgtgatcattcacccctactatgagtgaagcgttaaccccatctaacggttcgggtgttggcttaggcataaattccgtagttacagtcgttactgaaacctctttattcgacaacgtcctatccatttctaggacaagaatccaagccacataatctgatggagcatacaaatcatatttagatatttcaacctcaactgaatctgtcgtttcactaaccgatgatatctcaagtttggaatcagcaacattggtgacatgataaaaacagagaaatttatccttaaaaaaagtttcatcatacttatttacatcaaatttaatcgtagtatcattataataattttcatagatataattattaaggtcttccacagaaaaaactcttgtttcattcggttgattccagtattgactgcacataattaaagcattaaaatctctggattctgaattatttttctcttccgctgataccccgccaaaaataatactaagtactaatgttataattattgataatactataattcttttcatttattatcgccttctatcttatttaaaagtcaatacaattttataattcataaaaatccatatttaaatcctcgtatctgtattgattatttgctgctaaatcatgattcattgtcttattccaaacaggttctttattccatttactatatttaatattactcctgcttgagaggtttgtgtttgcggtgattcagttgtgattgctgctgtttttgtctcttcatcccactgtacatcgtaacctagattttcggagaggaatcgtagaggcaccattgttctgtcatttgacattcgggcaggaacatccatactctcagctataccatttacttttgctgtattgttatcgattgaaaatgatacctcttcgtcatttaacgtcgcggttgctgtttgggttgcctcctgccattccacttctgctcccattttttgaaacaaaaatctcattggcactaagactctatcatcctctagtatcggcggcgtatcaaatcccaaaacttctttatttacctctacatatatatcgctgtttggcacaatttgctccatatcgctgtattttagtttataagcataagtttcaccgtaacatattaatattccatccttttgctcctcaatccaactaatttgacttttaggttcctcaggcaaagtaaatcttgcccaatagactccgtcttttgaaaacgaaacatgtggcggaaacttttttccttcatttttttcactttcccacatcttttcaatagttgaattatcaaatgcctgaaatatttcttcatcacggttatcatagtttataaaaaacttaccgcatacatttgttgtgcgcatatctattccttccaccgccacctttttatcaggcttaaaattcttggatacaataggattttgaaaaaaaagctgtccaattgcgttttggtccttttcaatagttgtaaaaatagttgtttgactgtttgaaagcggaatacctattccgtcataaatttcttcccatgtactcaaatcttgagatttatatgtttttaaattagctaatgtaacataacatacattatcaatatatgacattttaataatatatgtttcatcaaatgaaatacttttaatataattaaaatctaaatcgtaaactaatattactttttgaataggcgtaacataataaggtagcacattatcaagttgtgtacctctaactaaatattcctttcctgtatttattatttgtgttggttcagaaccatcgccacctccagggaacatatatacataattttcatgttcatacataatttcatctgaaataaattttatatactcccagttttcacagtccttgcttctgtatatatccacaccatttgacatataattaatctttaaatattccatacccgtattatacagacgaggtgtaatataaccatcgtctggagttttaatatttctaaatccttctactacctccaaaggcgggtaaacttccagtgcaaaaactgattggcttatgctaataactagaataagtattgatactattatttttttcattttttatttttcctctcttgagatttttatgattttatataagccaactttatgtcaatatatctgtattgattattcgtccgctaaatcataatttattgtcttattccaaacaggttctttattccatttactatatttgatattactcctgtttgagagatttgtgtttgcggtgattcagttgtgattgctgctgtttttgtctcttcatcccactgtacatcgtaacctagattttcggagaggaatcgcagaggcaccattgttctgtcatttgacattcgggcaggaacatccatactctcagctataccatttacttttgctgtattgttatcgattgaaaatgatacctcttcgtcatttaacgtcgcggttgctgtttgggttgcctcctgccattccacttctgctcccattttttgaaacaaaaatctcattggcactaagactctatcatcctctaatatcggcggcgtatcaaatcccaaaacttctttatttacctctacatatatatcgctgtttggcacaatttgctccatatcgctgtattttagtttataagcataagtttcaccgtaacatattaatattccatccttttgctcctcaatccaactaatttgacttttaggttcctcaggcaaagtaaatcttgcccaatagactccgtcttttgaaaaagaaacatgtggcggaaattttttaccttcatttttttcactttcccacatcttttcaatagttgaattatcaaacgcctgaaatatttcctcatttcggttatcatagtttataaaaaacttaccgcatacatttgttgtgcgcatatctataccctccaccgccacctttttatcaggcttaaaatccttggatataataggattttgaaacaactgtggtctagttgaatttgggtcgttttctattgttgtatagatagttgtttccccatttgaaatcggaacacctattccttcatagatttcttcccatgtactcaaatcttgagatttatatgtttttaaattagctaatgtaacataacaaacatcatcaatatatgacattttaataatatatgaaccttcaaacataacttctgtccttatatagttaaaatctaagtcataaatacaaaatttcgccttatcgggaactgagttggatggttttgcattatcatatgttgtacgtctaactatataattttgtcctgtatttatgatttgaaatggtgaggacggttgagttgttcctggaaacatatatgccgcatcttcatgctcatacataatttcatctgaaataaatttaatatactcccagttttcacagtccttgcttctgtatatatccacaccattagacatataatcaatctttaaatactccatacccgtattatatagacgaggtgtaatataaccaacgtctggaattttaatatttctaaagccttctactacttccaaaggcgggtaaacttccagcgcaaaaactgattggcttatgctaataactagaataagtattgagactattatttttttcatttttttatttttcctttctggaaattttttataatttttattaatgctatgtttaatcattcgccggcgtatcggatataataagttgattcctaaaccagccgttatctgcggtaggcatacaaatgctaaagtttataacattgtttccaggttttatctctcctaaattaaaccatctctcatatgaagtatcattatttttggggctcagcttatactcgccgcgcctttttacaactacagctgagttgcagtcaagcttatatgtcaggtatctagtttttcctgaattatttatagctaatgtataattttcaataactccccagtttccgagagggacagcaatatcatacgtactcattccgctcggccgcgtatcgggcgtcgtgttagaaagaaggtcatttggcttaaagaaatacgggatatttcctccttgatgttcaatgagcttgccgttagaattttttgtcatattgatagatctaatttgagttctgtttacatcaaaaatccatgtctctttagttttttgatcatcccacgctccgtctccgtaatgcgacggctttccgctttcgggattggaatcataatattccaacggcagcaggtcggattggacacccacatctatacaatacggattttcctgaggattcacatgtgtagcccattcctgcgtttcacatccatttggattagcattgttaacagttttaacagttaaattcgttccatccggatgggttgtatcagatattgaaaaattcaaattagtattaacttgcggcagtgaaggtgaaacacctttatgatgcgtgtcgaacacataattagcctcgccgttccagttaatattgtttggagagccctgggttcctatatacgccaaagtattaatatcaacttctccgtccactgtaaaatcaatcataacaaaaataggagtttcgccatatcgttcgccaatttgaggatactcggcaccatatacatcattatatattttgcttaaccataaatgatcatcttgtatataataagtcctcggaaggttataattagtccttctgccattactaccaatagaatttatatttacaccacctaaccatttgtagtcagcataaccatttattgatgcccatcctccagatgactctgatattctgtctggtctctgcactccaatattagtaattgttatattggcaccgcctgttgaccaaaattcggcgtccaccgttattggactaccaagatcagtatggtggtacatcgcaagagtataattacctgaagtcaagcccggattacgcattaaccagtttttatcacctctgccatttgctataaaatctgaagttattgtttcaggattattggaaaatagatactttccgtctccaaccggactaaattccaacacattggactgattattcatttgttttgccacagccggatttggtccttcccacaatagagtgctgtccgatgcattagcaccgtatatccttaatttagtgtataacacatcgtttcccgcacttgaaagttcaatattgttcagcgttatttccgtcgatttaccgcttaacgtttggattgatccatttgcctgtttttcatagaaattcttattatcccatcctaaataaggtacgatgcgaaaaacctcatttgtagcgacagttctgtttattgtaaatttcaatgtatttccggttcctaatttgggtccctgaccatcgttgtattccagtgaagttatgctgcttatactagagagcggttgtttaacattgattcgcgccttagctgtcttgccgagatacccggcaaaagtaagataataagtggttccagcctttaaatttacacctatttgcggaaactcatcaaatttataccttgatactgcaatacgcttcgttaaagcctcatcttcgtataattcaagaataatgtccttatttaatgattgggttccattgttatacgctcctgttgtaaaaatatattctccggctgtgcttggcgtaaatttatattttgatatttctattcctgaaacttcactgtcataataattatttaaggtcaaggtctccggtgatttgctaactctcaaatccgcatgtactgtatttttgctatttttgttgcttactttgataaagtaattttgatttttatctaaattcaatgttacctttgaaaacgttgaaccgccataattatcgtttttggcaagtaaaacccctaaataatcatcggcatatacctcaagcaccgtatcgtttgccgctccggttccggaataaggcgctgtataaatatcataactgccggttgatgaaggtatgaatctgcgtataacatattttcctgcaggagcattgatgtttgcttcgcttccgtcaacgccaattgactccggcagacctgtaaaatattcgattttaccgccatactgtttttcaataatattcttttctgcctccgtcagttttcttattatatcattacccgaatagtccttcaatttagtaataaatatgttgaacttaccaatttcaacctggttgtgcattctataaatataatcgctttcctcggatgatatctcgtttatatcgtgaaatgtatccttaaacgcctgccatccgatatcctgtttgattcttaacataactgccgtcatacccataccaagattgtcatataatcctttcgcgaacatttgattataactgctataattatcgctgttataataattatatatatcgtcaccggtgtaatatttttttacacccggatcgtatatcttgatgcccggcgtattttctaaaacatagcatgatttcaagtttgcaagaacctcatagtcaaaagcccatgcttcctggtcaaagtcatgagaaatttcatgaatcaccgcgtcactccaatctccgtccgaaaggcgcatcattagacttctgttaaatggacgggaaaacattgcagggtttcccgcatatgccgctgctagtacccaagtgttagtaccatccggccaagcctgatttatattactccgcgtggagcgaatttcgattgtatcaccgccatacggagtatacccagttaattcagtcaactttgaatatactgtatccatatttgaaagccacctgtcaaaattagcattagcggctaatactttatcatccctttccaaagtcgctttaatcttatttttcgggcttgtaacacttatcttatccccttccctgattggcggaagctgtacccggcgataaattgaattttcagctccataggtcttaccgctgtcagttgaccaatgcattccaacaatgtacataccacccggcaccaatccggatatggtattagttccgcttgcctcgtaaataccattgtatggaatggtttcttttgtttcaccattattaaaatcaataagcgatattgcattaccttttgctcctgaagttggataagtaacgttataagtaatagatgtttcatctgtggatgaaattgttaattgtggatttgctgcagcagccattaccgccataccactttgttctagttcaatttcattggcttcactctcttcattatcttcaacaaacatcaaaggagccatcgcaccaacacttggtgcattttcttcaaactccatttgaggagttgtaatgtcaccttcaagtttcgcttcttcatccgaatactcggaaataattgacaaatgagcttgtttcagattttcaaaatctgttttctttgctgcaaaaaatgtttttatcttttcatcataatcatctgcactagatatattttttaagaaatccggcatttcatgtaaaagcaagtcgttttcatttaccatttctaacttattatatacctcttgtgaaaggccatatttgctatttgagtagaacgttctgcatatagatttgattttttgtttgtattcattaatctccatatcgtaatcgaatatgtcaaatccttgtaaatcttgaatcggtgctatattaatagaataatcacctattgctccaacagtcgccgctgaaagctgtattgtatacgttttctcagcttctaaataaccaaaccattttacattatcattggcgccaggcaatggcttgatttgctcaaaaccgcttattggttcggatggattgaccagtttatcagtaaataactgaactgtcacatttatcccagatggctgattaatttcataatagccagtttctggagttacaaattttaagaagtcaacatctccaacataattgattttaccaaaaatattcgtatctacctctttgacagtagcagcattttgggtatcgccgtagtcatcccatacagcatatagttcaataatcgcatcgcttacagttaagttatttacttcctgtttatttaaacattctgctttacctgttgccgttctcgaccagcctttaaactcataacctgctcttgtaaatgtatttgccatcaagttttgtgcaacattatatgtaaatctctgatccggcattgtgccgtctccaccgtttgcattatattttacactgtatgtatttgacttccatatagcataaagattatatactccgctttctaatacattttctatactggctttatctgtgtatacaactgaaccattagaagatgttgcccacccctcaaatatatatccgtctctactaaatgtattggctgtcaattcctgtgaaacgtcatacgtaaagctctcatccggcattatgccgtttccgccgtttgcattatattttacaatatatgtatttggctgccatactgcataaagtgtaaaaactccgccttctattaaatgtttcacactagctttatctttatatacaactgaaccatttggagaagttgcccacccttcaaatgtatatccctttttcacaaatatatttgccgccaaagcttgtgaaacgtcgtatgtaaagctctgatccggcattgtgccgtttccgccgttggcattaaattttacaatatatgtatgagcttgggtcgatacgtttacggtattactttcggctgttgcgccgacagcatcatttgcaatcaccttaaaagcatagttagtgacaggattaagcccggtgaatgtataacttgtatctgaaagatcgctctctttcaacactccatttagatacacatcatactttttatttcctgttcctcctgccgccgctgtccatgtgagagtaaccgaattgtaagtcgatgttttgactgtaagttccggagctgcaagtgaatcccaaaaattcactttaaccgggacataactcatcacacccaattgaccatatgtattgtcgccaaatgagaacaattttccgtttttatctaacacgcatgtaaatgagtttccacctgacgctgatttcgcattgcttattccgcttactttaacaggacttcttgaagttcctctatttccattacccatttgaccatctctgccttcgccccatgtatacacagttccgtcttcttttattgcaatgctgtgctcatatgccgcttcaacaaagactatacctctaaagtttggaatcagcataggttcattataattattcttatcgccaagcccaagctgtccaactgaatttctgccccatgaatacacttcaccatcggtttgcaatgctaaaacgtgttctcttcccgctgataactctatggtatgatatccgtccaaagaatgtggtgtacatagcgtcaaacgatcaatttcatcacctacacctaattgaccactgttatttcttccccatgctccaagatcttcatcattccacggatcattccaaatatattttgcaaccgtaaaatattgtccgcagtcaatggatgaaaatttaacttccatacttattcctttgcctggaacaccatacggcacggttttatctcttcccaaccgtccatatgagttatttccccaggtccatatgtcgccttctactattgcggcactgaacccttctcctgctgagataaacgttgcattgtttattcctgatatttttgtcggaacatagaccttgccttttagattactgccaagttctccgcttgaattattcccccagccccaaacattaccttctatgtcaagagctaatgtatgatttttacctttggcaacttgttttattttaggaagtccttcaactttcttcggataatacacatttgaattgtcagcgctgccatgacccaaatcccaataggatccgtctccccatgtatatacatcaccgtttgcgtcaagagcaacaacactgtttcgctttgcgtccacttggacaaattcaccatcaaacggaactctgagcggaacacaactgccgttaagctcagttgaataatcagagatatttgagtttggcatatacccccacttataaagattataatttccatcaaacataaatgaggatgtgctgtttacagaggcatattcacattcaatatttccaatactggttggaatattgctaaatgtatctttggtatttcccaattgaccatatgtattatctccccatgaatatcccctgccattataattaaaaatcataatatgatcatttttggttatgacttctcttacattgtatatgctgaccatttgagcttgagatgtgttattctgtatatcagaaacacccaattgaccttttaaattacttccccacgttaaaactctgtttgaaccgtttaacgctgcacttacatcattacccgcatatattttcagaacattatcaataccggttttttcaggtttactataattacccgaaccttcaaatcctaatttatagtaattattgttaccccacccccaaactgtgccggattcctccaccgcaagactatgggacttacctgccgcaatatccataacttttggaagaccggtaatttgagttggttttgaaatgtacggctctgtgctgtcaattcctaattgtccgtttgtatttaatccccacgcgtatacacggccgtccttatcaagtgcaagacagttatgtccgttagcggctattttaactatatttgatagattcgatattttctttggtttgtttatgtatgcagatgtattttctccaatttgtccatatacatttctgccccatgcgtatacatcaccttcataatcaagagcaagactaaaatcatcacctgctgcaaccgaatgtattttttcaagttcgactacaacaggagaatctgtgcttataacggacccgtctcccaactgcccgtaagtgttgtcgccccaagccaatactgtgccgtcataatgtttataaattgtatgtccaaatccggacgccatattttcactattataaactttatcaccttctccggacaccagatgcgggaacgcattaccactgtaattatctccgcaaatccatgcggttctatcattttttattaataacgtaacagattctgcagaaatattagaaacactttctatgcatgttttaacaggataagttgaaattatggtatccccggttccaagagctccgagctcaccatctccccacccccatacgcttccgtcatattttaatgctattgtataattacctcccgcagatacagattttacattatcaatatatatctgagcgggattatttctatcttgtccttttccgtctccaagctgtcctttgttatctgaaccccaagtaaaaacataattatcatttgttacagcaacggaatggtcgctcccggctgaaatcttttttatactaattccgtctaaaccaacaacttgcacaggcgactcacttgaatcataggttccatctccaagttgaccattactgttatttccccatgcccaaactgtctcatcattctttactgccaaagtatgatgaaaacctgtagaaatatatttcacatcacttataatagctgttatagggtaaagacttttttcaagcgttccggttccaagctgaccgaaatcattttttccccacgctgcaactgttccgtcttgcttaacggctaaagaatgcgtattgtttgcagaaatagcttttacattgcttatggaaaccttaattggtatatcttgatagtttgtattgcctactccgcattgaccataagtatttgctccccaactccaaaccgttttgtcagattttaatgcaatactatgagaaactcccgctgataccgcagttatattagtaagccccacaactcgtgtgggctcagaagaactgttattccactcccacactgttccgttactttttaaaaatatggtattatatccacacgtggaaaccgcctgattctgttcagaattaaacaactcccaattttcactcggagttttttcactttctaagacattaaaatcatcctccggcactatatcaataatttcattactgctcgttccatataccaggttagaaaagttcagcttatttccatcggaaacttttccgtcaagacatgacagtttatccgatgtggattttaaggtctctttaagatttttattatattctgttcctgaaatcagcgccgcagcgccggaaacatatgctgctgacatgcttgtcccgttcattgtgccgtattcgccgtttggaaaacaactatatacatctctgccccatgcagatatgtctacattttgtattccatagtttgaaaaatatgacattcctaaatcctgattgagcgctgcgacgctgattgaattctcaagactaaatgctgccggatataccggagtttcatctatatttgttctatgattccccgctgcacaaacaaaaaatagattagattgttccattgtatctttaagcgcctgattattatctgagcttccgaaactgcaatttactatagttgctccattatcttttgcatattcaatcgctttaattatatcgcttgtatatgcttttccattttcaaatactttaagcggcataatctttgcttccggtgcagcttttgcaataattccggccacatgagttccatgagcctgatcaaatcctaaatcctcattgtaaacttcacttctattattataaaaatcccagccgtctactattttctcaaacagttcagggtgattaacatcaacacctgtatcaataactgcgaccacagcgccctcgcctttacttaccgaccaggccttgtttaaatctgcatcaatatcatataattgattttcagagttaaaatttggcatagctgttgatatcggagaaacagattcctccggttcagatatttgttcagcatctatttcttgaatatacatcccttcagtatgctcattcgtagcaacaggatcctctattgtattttcatcagcatcaatatctttttcactatccgaacttatttcattttcttttatttcaatagttgttttaggctctgtatcattgtcagataactccataatataatccggttggataaattctataacatcccctgattcattcgaaacatcctgaacaaattcagcggcatttacactgtcaggaagtataatcacttcatattcatcagagtcaaccggcagagatgctgattctatttcaacaccagtaaatagttcctgtatcttttgacagaaactttggttttcatttatcttacttgaaaatcttaaattattaagttcttttgcgttcgcttccttaaatttttcaagacgttcttcctctgttttttctttttttaacttacccttattaaatgcattcttagaagattcttttatttcatctctgctatttttatcattatttttgtatttgattatgtatctgtcattaaattctgcctcttctttgagaacctccatgctttcctcagataacagtttgtcaaattcttcaggagaagtattctcagacaagttagaaacacttctttcatcattagaattttctataaccttttccattggaataggctcatcaaaaccttcggctgttatgtattcaatattatcatataaatttgtatcttctttatccccagctgttaattcattaaaatcaattgtttcatctttcgcgattacataaacccccgaaaatgctgttgcaaacataaatattgcagcacaaaaacttataaatcgtttattcattacttaaccccctccgtacagtattaaattgtaatcaaaaactcattactttatgtaaatcaaattatattgcttgcacattatcactccccaccttctatacttcctattaactattttaaacaaaatatatcttaaaatttaaaaaacttataatattacttcgttatattttgcattttcattaaatagaatgttttgttattataatttttgagcattacttattaaagaattcttaaatttatttatacatgttatataattataaaaacactttttatttcgcatcatgttaacaatatagcataatatttttgttttttcaacgatataaataataaacataatttttctatataactgacaaacatcattaattatttttagcaattattactaacacaaaatatatttaacgatatacgaaattataaataatatgctatattacttattaaaagtcagtttcctctaaatatagtcatttcttcacaacaatttttaaagcaaaataatgattatcatatattaatagcaaaagcataaaagcattaattatataacatttgtttgattgatataatctgctgttaatatttttatttatataatacatatatttttcaataagatttttcttccgataaaacaaagagttcagttacaattccaaagacttgccccttcttctttcatcttgctttttatttttgattttctgtataatatgtatagtgaacacaaaaaatttatttttgaaatataaatattatttacatttaattcctgtctatatattatgtctttttagtatattgtccctttattttacaaataatattgttacaaaatttgttagcttatgttttgacaaatttagtgctgtatggcaattacaataaaatataaaaaggagcgttaatatatgaaagcaaccggaatagtcagacgaattgatgacttgggacgtatcgttataccaaaagaaataagaagaactttaagaattcacgagggcgaccctcttgaaatatacacagacagtgacggaatggttatatttaaaaaatattcaccgattggagaactcagcgagtttgctcatcaatacgccgacacattaaacaagtctacaggtttactcacctgcatcacagacaaagacagcgtaatcgctgccagcggaaacggcaaaaaggaacttaaagagaaaaaggtttccggtgaagttgaaaaaataatggaaaagaaaacaatgttctattccaagcaaaatgagaacactattaaaatcattgatgacagcgacaaatacaaagcaggagttgtagctcctatcgtacacgacggcgaccccgtcggaacagttatattcatagccgagcctgaaaagagcatgaacgaagttgagcagaaattggcggaaacagctgccggatttttaagcaaggctctggaataaaagacatagaatacgcccacggcttcaggctatgggcgtatgtttttttatacaaagtctgacagcattatatttgacacatatatataatcagattttatttttattatgtccccgtgctcttccattgttttgagcaggtttatatgcttattcagctgttttccgaaaacatcaaaaatatcttttccaaacatattcataaactttttttttgaaattccacggtcaagtctcagacccaaaaacacaaattcacacattcggtcatattcagcagtttcatcaatctctactattccgcttccgctgttatttacacgatctatatatccgctgacacttctttcgttgttaaaacggaacttccctatacacgaatacgctcccgctccaaatccaatataatcatctaaattccagtataaaagattgtgacgtgattcataccccggttttgcaaaattcgatatttcatatctgttatacccattattattcagataatttacgcagaagtcatacatctccctatttttatcatcatcgggcaagtctaaatttccgtcgttaaaaagtctccaaaagggcgtgccctcttcaatctttaatgaataagccgaaatatgttcaggctccagctctgccgttttttccaacgttcctttccataagtccaacaactggttcggcaatccaaacatcaaatctacagaaatattttcaaacccggaattcctggcatctttaaaacattccaaaaaatcattatagctatgtaccctgcctaaactttttaacatatcgtcatctgacgactgcatacctatgcttaagcggtttataccgcattttctcagcctgctgagtttttcaaagtccgccgttccgggattgcactctatagtaatctcggcgtcatctttaatcgaaaaattatttttaacagcctcaacaatcttctctgtcagcgcggtatcaatatatgtcggagttcctcctcctatatatattgagctgagtttagtatcaggcaattttaattttgccgtttcgatttcctttatcaaagcatccgcatatgaataactcatatccgtcattcccgaatatgagttaaaatcgcagtatttacatttttgtttgcaaaaaggtatatgaatatatgctccggtcataatttaatctccaaaattattcatcaagcttcaatacggacatgaacgcttcctgcggcacttctacgcttcctacctggcgcatacgctttttaccctctttctgcttttcaagcagcttacgttttctggatatgtctccgccgtaacactttgccaaaacgtctttacgcatcgccttaaccgtctcgcgggcaataatctttcctccgacagcggcttgtatcggcacttcaaacaactgtctaggaataacctcttttaacttttcagccattcttctgcccctggaataagctctgtccgaatgaacaataaacgacagtgcgtcaaccatttcaccattaagcagcatatccagtttaaccaggtctgacctctcatatctttcaaactcataatcaaatgaagcgtatcctctggttctggatttcagcgcgtcaaagaagtcatatataatctcgttcagcggcagaaaatagttgagctgaaccctggtttcatcaagatattccatatctatataggttccccgcctgtcctggcagagctccattatactgccgacatattcctttggtgacaaaatcgaagccctgactatcggctcctccatataatcaatttctgaaacgtccggcagatttgttggattgtctatagttaaaattgttccgtccgtttttattaccttatactcaaccgacggcgcggttgttaccaaatcaaggttaaattcgcgctctaacctttcctggattatttccatatgcagcagcccaagaaatccgcacctgaatccaaatcctagagccaccgaagtttccgcctcaaaattaagcgccgcatcgtttagctgaagtttttccaacgcctcgcggaggtcgtcgtatcttgctccgtcagccggatatataccgctgtataccatggacttaacttctttataacccggcagagcttcctcagcgccgttttcagaagttgtcaccgtgtcgccgacatgaacatcctgcacgtttttaatgctggcggtaataaatccaacctcacccgcagaaatttcatcagctgaaaccaaaccgttaggatgcagataacctacgtctacaacatcaaactcactgcctgtcgccatcatttttattctctgaccggattttagcttgccgtctataatcctaacataaacaataacacccttatacgcgtcataataagagtcaaaaataagcgctttcagcggtgcgtcttcatctccggccggtggagggataagctcaacaatcttttcaagaacctcttcaatattgattccgtttttagctgatattaaaggcgcattttctccatctatgcctataacatcctctatctcctgcttcacctcgtccggtcttgcgctgggaaggtcaattttatttataacaggtacgatttcgaggtcatgctccatagctagataagtgtttgccaaagtctgcgcctcaataccctgagcggcgtccactaccaaaacagcgccctcacacgcagccagggaacgagacacttcatagttaaaatcaacgtgtcccggagtgtctattaaattaagctcatactcttttccgtctttagctttataaatcaatttcacggcacgcgcttttatggtaatcccgcgctcacgctccaattccatattgtcaagtatctgcgcctgcatctcacgctgggttaaagccccggtaaactccaaaagcctgtctgccaaggtgctttttccgtggtcaatatgagcgattattgaaaaatttcttatattatcctggcgattcattagttttcctccaagtcggttaatcaatataaacgaacataactgttctactgacataatattctaacataaaccgccccaaatatcaacatcaaatttgcctataatctatctgtatctgtctacatccttgagtgttattccatcatttacggcaatatttatcccatttgccaccactgaagatatatcgtcaattatagtgtcaacatctttcggcgcaactataaagcttccgaactttggttttataacctcttttataagctcatacttttcgtcagccatttcaccgattagctttaaagtctgtcttgtcggcaaatctttcaaaactcctgccttgccctggctggcagcattaaccagcatgtccagcgtatctccggcaattgtagcagcgtctacaaccgtgggtactccgattgcaattacaggcgttcccaaagtgtcaatatttaagcccttgcgcttatttccaaccccctcaccgggagttataccggtatcagatatctgtatagttgtgttgacgcgctccatttttcttgagcagagagcgtctatagcaataacaagtttgggttttatcctgtcaaccagaccccttattatctctccggtttcaataccggtcagtcccaacactcccggcacaatgccgcagattgagcgcacaccgttctgaatctcgtcagggacatactcttttagatgcctggttatcattaatgacgatatgaccttgggtccaagtgcgtccgcagtgatattctgatttcccaaacctacaaccaaaatcacatcatcgtcttttgttataaacttatcagtcaggcttttcagttcctcagcgcatacctggcacattttttcatatattttctgttctccatagaacctgctgggcatttcaatcgttatatagtcacccttaggctttcctaggttttcttctccctcttcatttaatatttttacgcgagtgacttttattatattttcaatagaatattcatcaacggatataccaccgacctcatcagctttttctgccgtttcggaatataattctttcgcttccagcgctaagtcgcatctaacttgttctgccattttatcacctcataaaattttatatagatatattttttcgtttatcttaatttatatactataagattatttataaaaacacacggcgctgagaattgaaactgtttttggaataataaaaaaatttaaaataattttaaaaaaagtcttgcattatggaaaatataatggtataatacgtaatactgatgtaaaaatcaaatcgttattgtttggaggtgaaattatgcctaacattaaatcagctaagaaaagagttaaagttattaagaaaaagactcttcaaaatcagattattaagtctcagctaaagaccgctatcaagaagtttgaagcttctttaaagcaaggacaggcagctgcctccgatgcttacaaggttgttgttaagaagacagatcaggctgttgcgaaaggtattcttcataagaacactgcatctcgcagaaagagccagtattcaaatatgcttaacaaaatcgcgtagcataatcaagatataacaggcggtatgcctgcaataaattgaatccatggttgcttaggcaacatctaacacttggaatcattaaaattctacaaatgatcggagccggacgcggctccttttttatttttaagttgacataagtcatattatatgttacaatacgttcagattttaagattggagttgaaagaatgcgtaatttttcttgctgatattttggcataacagaattatggaagcggatccttccgcctgtttgttatgtccgcgcaagaaagttaccaattcatacaactcaaaatgtttttatatatttaacctttttcattattatgaaattttttgagctgccgggatttactttcttgcagctttcataattttggaggaggtctttttatgtcccaaattaatatttcaaacctgacgtttgcctacgagggcagctatgacaatatatttgaaaacgcgtcttttcagattgacaccgattggaaaaccggacttatcggcagaaacggccgcggaaaaacaacgtttttgaacctgctgatgggtaaatataaatacagcggaacaatttcatcatctgcagactttgaatactttccgtttaatattcctgacgacgatgttaacacgattgatattgctgaatttattttcagtgattttgaatattggaaactttcccgtgaaataaacttgctcggcatgagcgatgatattttataccggccttattctactctttcgggcggtgaaaaaacaaagtttcaattggcagttttatttttgaaagaaagtaaatttctgcttatagacgaaccaacaaatcatcttgacgctgagggacgtgaaacagtcgcaaaatacctcagtcagaaaaaggggtttatccttgtttcacatgacagagcctttcttgacaagtgcgcagaccacataatctcaataaacaaaacaaacatagaaatacaaaaaggaaatttttcatcatggcttttaaacaaagaacagcgtgataatttcgaactgaccaaaaatgaaaagctaaagaaagatataaaacggctttcacagtcagcacagagaaccgccaaatggtcagacaaagtagaaaaaacaaaatgcggaaccaaaaattcaggtctcagacccgaccgaggttttataggccacaagtccgcaaagatgatgaagcgttcaaagtctatagtttcaaggaaagagactgccattgaagaaaaagccagcttgttaaaaaatattgagacaactgactcgcttaaaatacaccaagtcccatttaaaacaaaacaattgattcatatggaaaatgtatctataaaatatgacgcaaacataatttgcgataatataaacctggatgttctgcaaggtgacagagttgcaatagagggtaaaaacggctctggaaaatccagtatactcaaactgatttgcggtgaaaaaattgagcatggcggcactgttcaaataggaagcggtttaatcgtttcatatcttcctcaggatgtctcttttctttctggcagcttaaaggaatattccatagagaaaaatttagatgagacattatttaaaaccattctcagaaagcttgatttttcacggatacaatttgaaaaagatatgaacaactatagtctcggtcaaaaaaagaaggtgctgatagcgcagagcttatgtgaaaaatccaatttaattatatgggacgaacctctgaactatattgacatattttctagaatgcagatagagaacttgctctcagaatttaagccgacaatgatttttgttgagcatgacaaaatattttacgatagtatcgcaaacaaaacaattcatatataaatctattccgtatatgtaaaataatagtataaatttgctgactaatatactcgaatttactcatcctgcatattcaatattttcagcctgaatgcacatttttcagcctgaataccatatttacagcctgaaattctccggatttacatgacagcaaagtaatgttaagcaaacttgctccgcacttacagccttatatactcctcatttacaatcaaacattttaaaattcaacagaaaaccagacaaaaaattaatggtgtttttagtgaaccttggtaggtgtgaccccacctgtataagactaactattaaaagtcaatagaaaaataaaaaaagttaaaatcttttcggtcaaataaggaaactagaaaattgtatgtcaaataaagcaatagtaaattgcttaaaaaaatagtattaaaaatacagtattacataaactcaaacggcttggtaactctgacccgttttctgtaaatgatagattactctcactagtttttttactgcatgagatattgcaacattgtaatgttttccctcagttcgcttttttgccagataattcttgaaggtttcatcccaatgacatacatattttgctgcattgtataatgcgtaccgaaggtaacgcgaacctcgtttctccatgtgtgaatagctattggttatttgtcctgactgatacgttgatggtgacattcctgaatacgcaagtattttatcaggagatgaaaacttactgaaatcacctatttctgctactatcatagctcccattgtgtaactgatacccgggatagacagaataggcgtgtttatgttatccataatatgcttgatttctgcttctatctcctcaatttctgctgtaagttcttgtattagctttatggtatgctttagctcaagagattttgctggcatgtctgaaccgattgagttttttgcggcttccctaaaaccaattgcagtatctttgccatatctgcctctagatgcagtatgcagcaggtttgtaagcttcgttaagtgggcttctgcaatatgatgggctgacgggaactctgaaagcatagtatagacagattttatatgcagcgaaggaacaagtttttcaagttccgggaaaagtatgttcacaagccgggaaacagtggttttgagttttgctctttcagaaactttataaaatctgtatctggttagtgactttaattcttcgttgtgatataatatatctgagtaggactttaagtctacattagacattaacatcatagcgattgtatgggcatcaattttatccgttttagtctttctgaggctgagagactttctgaagagattggtatgtaatggattgataacaaaggtagtcaaacctttatcaagaagataacccaaaagattgtatgagtaatgtcctgtggcttcaagccctacttttactttgttaaaatcttttgaaacagattcaattctttgataaagaaaattaaaaccttctatagtgttctgaatagtaaaagcattaaataaaacctcgccgtcagaattgcaaatgaagcagtcgtgcttgtcctttgcaacatcgataccaacaaaaatcatactaaaaactcctttgaaaaaatatttgatactgttccacagatactctttacgattgtaacctcgttctaaataaaccgtcgtgcggtatctaactaattaacaaatgtataaagagactgtggttagagccttcaagaaaccatcaagtggtaggtgggtgtaactaatccacagtatctaataacattatagcacatgcccttaaaatcgaacaatattaactactactttattatacgaggtgggtgtgatacaaagttacctgttttgactaagctacaatgtctataaattacttaattgtgatgtattgcgcgcttgagcatctcgttaggtgagctgccatctcacgcaaagcgtgaatatatttagagcaatttatcataatccgttttatattaaactgtcccacggctgcgcgccttacgaggcagatttcatcttcattgagtatacatattaatgaccttgtaggttgtaaagaaatgagtatgtatgtataacacacactttttaagaaaagtgtggtcacagccctaccgatgcttgctacaccacatttttctgtaatttttatattccttttcattacatatgactcaacatttctgttcgatttattgttgcctttctatttagtctcattgttttagagctagaaacttacttcttttatatagtaattgtatattgttcattgtagcaattacgtctgcagttcttctcagagacaagatgcttactaaaataatgccaaataaatgctgtatcataatataattgacgtcttgaaatggaaattattatatgttataattatttatattgacattgaaacattttatataaataaattttagaatggagtgatttttttgaacgaaacaattaaaacactgctggaaagaagaagtatcagaagctttaaaagcgaacaggtcaaaaatgatgatttggatttgattctaaaggccggaacctatgctccgacagcccgcggcacacaagcaccggtcatggtcgttgttcaggacgctgagaccattactgaaatggagaaattgaatgcggaagttatgggaaatcctgaagctaggcctttttacggcgctccgacagttattgtagtattctctgacacccgtcttaccaataacgcctttcaagacggaagccttgtgctcggcaacttaatgaatgccgccttttctttaggagttgactcctgctggataaatcgggcgacagaaacgtttaaaacccctgccggaatagaacttatgaaaaagtggggacttgatgaaaattatattggtatcggaaactgtatactgggttacagagattgtgaactccccgaagccaaaccgcgcaaagacggatatataatccgaacataaaccaaaataggagagtatacaaatgaattttaattggttgaaaaacaaaaaatttactgttatagccgctgtattatcggcaatgcttgcggcaggaactcttgcaggatgttcaaatgtttcaaaatcagactttgacgccctggaaaaacgtgtagaagcactggaaaaaggcacagacaacgagagcggagataaaaactcatctgagacaaacaaatcaggcaaatcaactgcttctcccaaaacctcatcaaagccaagctctgataacggagagtttgactccgaaaatgtaagcaaggcaattgatgttcaggaatacgactatattgacgcagatgacaataagttttctttctttatctttgataacacttcaaacttcgacgtcaatgcccgaatagaaatagtatgcaaagacaaagacgataacatccttcaggaaagcgaaaaaaaagttcccggattatcaaaaggcgagagttcattcgccagttttaaggttgacaaagacaccgaaacaattgtcagaacagtgtattatgaagaatataaagggaaagacgtctcaatcggcgatatatccgctagagctataagagcccagggcggagccaacattaccattagaaacagcggctcggcagaagctgaagatataaaatatttgacgctgtttttcagcggcgatgatttggtcggatttgattccgataaagtctcggatattgaagcgtcatccagcaagaccctggcttctgtctgctacgaagaattcgacagccctaaggtttatgttgctatagacgacgaataatccgagaaaaatttatatataaatttattaaaattgggaacttatcaaaaattattacgtcttataaaatatagggagaagtttcaaattctgacctatctttagcaaagacggcaaacacagatgaaagtgcgtattcctctgtctatcaccgccgtctttgctaggcacccttataaattattttatggaagtaatccaaaattgggtttgttttcaatttattttctgtaaacaaaatagagcttcattatattgtgtcaatcttcaaatgttagattttttgtctaatttcaagggtcggctcatattgcttgaagccctatttttttattatctcatattatcgcatacagttattcacatatttcaccggaacgtccattctttcggccgcttcttccactgtcattccgctgtctataaaacgcttacatacgcttttcatattttctccaacctcaataatatgtttatcagggtcataaaaacggacaactctctgtccccacctatgctcgtataccttatgaagatagtctatttcaagctttgatagcctttccgtaaacttgtcaaaatcatcttcttcaaaatatatttccgcatcgtttccgccaaaagaaatatctttatctgacgcattaataaactcgagccacgagtcttttgtttgaagacacaaccctcccgtcagagttatatttgctccaaagtccataatcacacgcagacccaatacttctttataaaatttctttgaattttctaagtctgttactattatcattggattttttaatttcattttgtctacctcactatttttatttaatatcaactgatttataattatctatacaaaacttctaaattgccgttatatcccatactatccgactttcccggcgcttttaataatttgcttttttcattctttattcctgattttttcgataacagtccctatgcccactcctaatatcattccaaataccaagccgtaacacataaattttcctattttcccctgagaaacacctaaagcacaacctactgccatccccagtattgttcctaaaatcatacatatggtgattgctttactaattttgttcatagcataccccttcacacttccatcttcactctcgataagcggaaaactaaaaatcaatacaacaactatttataatttttatcctttaaataacattatgaatttatattataaaaagttgcttcataagcgggcttcacacacatgcggaggaatattctctataaaaccattgggacgcaattgacagcaagacaatgcgctggacttatccgtaaacgcttctgcataatcataacatatatcaacaaattctttataacttttcctagacaactgtaataaaaatcaaactttcctccgccagcccacattttgccccaaaacctcgcaaaccgtacaaattatattacttcacagcggttacattaattctcctgaatgtttcaaagcacctgccgtcaggctgaatcgtcctgctaatcatttcctcaacaacttcgctcctaaactcttcttttaattcgtcaggtatctgctttataaaaggcacaatgctcggctggtctatccatctgatcatttcttccttatcagcaaaaaatctatcttcatttttttcagacacttcggcttttgagaaatttactgatttgattaactctatatactctgcttttgacggcataaaccagggccattcaaaatctttaaaatactcagcgtatttatcgtttttcattttttcccgtataacttcaaaaaagtttgaacatgttccgccgccggcaaagttccaggctatttttccattgggttttagagccttataactcctctccaacaaatttttatggtctataatccaatgtaaagcggcatttgaaaatattaaatcaaatcttttttcaaaatccataaaatttacatccatttgaacaaattctaaattttcacagctcagtttttttgccgtctcaatcattcctaaagatgcgtcaatccccaaaacactcccacggggcgttaattctgacaactgctctgtcaagactccgtctccgcagcctaaatccagtattatttcatcaccgcttaactccaatcccgaaatcagtctgtttccccattctttctgatgtttagaagcctttttgtacttttctccgtcaaattcatacgttcccaatattaaacaactccttattgcagttttaattcaatttattggattattaccaatattttaaattcttttatatttaaatttttagaatattaactcaaaatgtataaatccaactagaaatgataaactccaaaaccgacgtatactctatagaattcaacctttatagaatttattaaatctaaaaatatactattctgctatctgatttaaaaaatctttaaaactacattacttataaattttaacatataatattaaaaaattccagctttatagaatttattatatctaagaatacactattctgctataagatttaaaaaatcttaaaaactacattgcttataaattttaacatataatattaaaaaattctagctttaataattattgttgggcacaaaatatgaaattcagttaacaacatatttatatacataattattggggtttggatatgcacgcatagcgcgcggcggctgctcacctaacgcggcacataaatgtgcccttccgatgctcgcttcaaatcttggttttgctatatcttatttttaaaatagtaaaacaaagttgtttatgtatataaccattttatatatttatgtagaaaaaatgtgcatttacactcaaaacacggtctattttttaattaatcaatacaaaaaataaaatatatatttatctatcttataaaagcagatatttgggcgagcatcggtagggcgtgcttgcacgcctcgttaggtgagcagccgccgcacgctaagcgtgcatatccaaacccaaataattatataaatacttattgcatacaaactaaacgcatttttaagctattaaataaacagatatattactgaaagcttcttttattatataaaataaaacagaagctcaaatattaaaataaatatctgtgcttctgcttaaaacatattttacaaatgattataatctaattatatcaatttacttttttacaatcggtagccatacttcgcttctgtaatcttccgcctgctgataccgctcaggataaacttcaatatccggcgccgcagcatattcatagcctgatgttgggagccattcagatattatgcgctgctgtgtattttgtattgattccggcattggtccgacgctttcaaacattgcataggtagtctcaggaataatatattcttccatcccatcaggaacaggtttttcagtagcgacagctataaaatatccggaaaaatctcctttgtcacaagttgaaactcctaatattccctcaggctcactgccgtccatcaaagcgcacaacttgtcaattccgccttgctcgccaacatttttccagaactgcggaactttttcgaaacagtcttccattgtcataggctcttttatagaaaaccctacgatacgaaatgattttttagtcttaattttgtaatccattgcttcttctccttttattgataaagtgaaggtgatacgcggaaaagttgtaagccggactccctctgactttgccttagacggtgaaataccatgtacactttgaaaagcacggttaaaagctgtcggcgactcatatccatacttaagtgacaaatcaataatcttttcatgaccgtttatcaagtcaaaagcggcagcgctcatacgtcttcttctgatatattcagaaattgtaactcctgcaatataaggaaatattctttgatactgaaacactgagcaggccgcaagctgagccgccttctccatttctatagtttcggtcaaattttcctcgatatattctattgatttatttagtccttctatccaatccacttttatcaccttccaaagctattatacaaaatattatatttaaaaacctctctgcctctgaacaattaaagagagaatttgaaaagtcagcaaaaaaccaggcagaaagtttaaagttgtttcttttgtgatgtattataaccacatctgcaagttgggttacatcttcgggtgcttgccaagcacatttttataattttattgaattattttcctatatactatgttctcagtgaacatcggcagggcgtgtttacacgcctcgttaggtgagctaccatctcacgcgaagcgtgggtatattcagagcaatttatcataatccgttttatactaaactgtccctcgactgcgcgccttacgcggcaaactacgtttgccctgccgatgcttacaaaatcacatttttataattttattgattattttactatatataatgtttttcagtgaacatcagcagggcgtgtttacacgcctcgttaggtgagctaccatctcacgcgaagcgtgggtatattcagagcaatttgccataatccgttttatactaaactgtcccacgactgcgcgccttacgcggcaaactacgtttgccctgccgatgcttgcaaaatcacatttttataattttattgattattttactatatactatgtttttagtgaacatcggcagggcgtgtttacacgcctcgttaggtgagctaccatctcacgcgaagcgtgggtatattcagagcaatttgtcataatccgttttatactaaactgtccctcgactgcgcgccttacgcggcagattccatctgcattgagtatacatattaatttttgcgtattcatattattgacattgtaggttaatcaaaacaagtcactatggcttacacccgccctacgggcagggtcacagacattgtaggtttatcaatacaaagtgatatgtataacacacacttttaaaaaaaagtgtggtaacagccctgccgatgcttgctaagccacattttttatataatttttattatattttttttaatatttcagtttaatttattacattctttccaattgttatttgagtataccacaggttttataaaaacatattaaggacatatccgaatattaaaacggcataactgaaattagttatgccgttagtattaattttctaaaccggatatgtatgatttacactaccaagaagttgctgaaatcagcatagccgcccttttcaccgacacaagcaagcgcaaattttgctcctacccatttgccctgcatacattcaaattcaccaagactgatgaaatcgcttccatcaacgctgtatgatacacggcagctcgcttctttactatttgtgcaggaaataacttcaagccttaaatatgcctcggttgtgccgacacacttatcagtaactttccattctctgttatcagtcttaaagttaccgttacagtattcaacaattccctcatcagtcagcgctacataaccatatttttgaccaataaccgccagcactgccttattgtttccaacgcccttaggcattgaaactttaacagttgcaaccatcgaaggcgcctgccaaagctgggttaaaagattcggaagattccagagatatttatcctcttttgtctttaagtcctcactgtacagtctcagacttcctttattttcagtaagtgaataccattcttctttattattagcctgccactgccactggagaccaagtttatctgatgaaaaatcatctgaagtaggaattgtggttatcggatattctgcgccgacatttggcttcttacaacgcataaccggttgtccgcacaggcctgtgtccgcgttttcacccattaccggccatccgtcaacccattctaccggctgaagatgaataattctgcctattacctctaaatcctgaaaatgtacaaaccagctctctccgctttcaagctcaaccagtccgccctgatgaggaccgttgatttctgtaagaccttgacgcaatacaatgtgatcttcatatggaccgtaaacattctttgacctcattgccacctgccagccggtaggaacccctcctgccggggacaacacataatacattccgtctcttttataaaatttgggtccttctatagtcggctgacttatagttccgttaaatataatcttatcttcgcctatagcttttgttccgtcccaagtcatttcgcagactgcaatatggctcttgattccgcagcggctgttggcatatccatgaactatgtatgcttttccgtcatcatcccaaagaggacaggtgtctatgagtccaaccccttctttaacgagtatcaaatctgaccactcgccgtatggatcttctgtccaggtcataaatatacctatatcaggatcgccgtaatatatgtaaaactttccgtcattatatcttatagccggcgcccatacaccgcagccgtgaaccggcttattatatctgtcgggaagctttttgacagcgtaattaataatttcccaattgaccaaatcctttgaatgcagaatcggcagtcccggaacatatgtaaagcttgatgcggtcatataaaaatcgtctccgaccctaatcacatccgggtctgagtaatcagcatacaaaattgggtttttaaaagtcccgtctcccaaatccgcaatccattttccttccagtgtgttcataattttcctcctaaatctaaacatatcctaaatcaggcggataaaaatccgcctgataattttataaaaacatatactatcgttataattttgtattttgttaaaactaaataatatcgtaagttttctaattttaatcaaaaatgacgttatgcaataataaaaatttttaacatacttaatcacctgaagaaaatatataggaattcttagcctaaaatttatcaacgttagggttaagtttttgcaaatattttaacaaacaataatcctttattaaagaataaagtaatattatttaactgataactttatgacagcaatattaactgcttaatacaattttctcaaatgataccgttaaaactcaaccgctattttctctcatgatacttttatcaaaaatcacataaagcgatttcctgacttttagcagttgccatattttgatataaaatcatcaagattctacgccaattatctcatctaaaacaactctaattgattactgtgagttttcagaacttctcactccatcgtaaagataaagcggaaatctctgcgtataacaatcagtcaaatctataagactactccgtctttaaagatagaaatttcacgataaccgttcttctcgttatttgtctgtcttccgtttgctacgtctataacaaaatcaaacaaatcctgagtgagaacttcgccgtctactataggtcctgcattaaaatctatccagtgcggttttctttcagccagtcctgagttagacgaaatttttacagttggaaccggagctcccagaggagttcctcttcctgttgtaaacaaaatcaaatgacagcctgaagcggtcagatttgttactgcaacaatatcatttccgggacctgtgagaaggtttaaaccctgctttttcacatgctcgccaatctgaataacgtcaacaacatcgctggtaccactcttctgcacacaccctaacgacttatcctcgagcgttgttataccgccctttttgttgccgggagaaggattttcatatacgacctgattatggcgcataaaatattccttaaaattattgataagatcaacagttttgtcgaacgtctccttatcatgacagcggttcatcagcagagtttcagcgccaaacatctccggaacttcggtaagtatggtgcttcctccgtgagatatcaaaaggtctgaaaactgaccaaccagcggattagcagtaagtcctgaaaaaccgtcgcttcctccgcactttaatcctacaaccaattttgaaacatcacatttctttctggtaaacttctgagcgtactcaacaagctcaccgattagtttcagtccctcttcaacctcattatcatagtcctgagtggacataaatctaattctttcaggattataatcccccagtatacccttaaaaaccggaatattgttattttcacatccaagacctaaaactaaaacaccggcagcatttggatgatttacaagaccctttaaaatcgcctgagtagttttttggtcgtcgcccagctgagagcagccaaacggatgaacaaaattaaatataccgtctgtttttccctcaaacagcttatttgcttcgcgcgccagcagttctgatgtcttgttaacacagccgacagtattgacaatccatatctcatttctgatacctacgcttccatcatcgcgcacataacctttaaaatatgccttctcgtctgccttttccacacctttaagctgcggttcatatttgtattccaatataccgctgagattagtttttatgttatcggtatgaacatgctctcccttttttatatcgcgtattgcatgtcctataggataaccgtattttataatatcttcgccctctttgatgtcccggtttgcggtcttatgcccgtcaaactctccgcctacatttacttcaacattgtcaagaggacttattttaatttttcccatttgtttatctcctttctcaaagcgaaagaattaacatatcagccgtttacaacttcttccatagcggctctgatacccttttcttctattgattttagataaccgtttattgagtcttttaacatacttaaatctgttccccaatattcttcttttgaaagaatatcgtcaacagaagccgtcttcataaattccataacatcaggattatcgttagcggcgtctgttctatagaaagctataagtgcagccagcgagaacacaaggcactttggctccttattgttctcttttatatattcaagaactgacggcagcactctgacctgatactttgatactgaattcaaagctatgctgagcaaatagtgcttgatgaaaggattctggaaacgctctataacatcattggcaaattgaatcaattcatccttaggaaggtcaagagtcggtataatctcatcaaatacaccggtcttcataaagttgaaaacaagctcgtcatccatagcttctttaactgtttcaagccctgcaaggtgtgcggcaagtaccatcatagtatgcgcgccattcagaattctaacctttcttttcttatatggcgtaacatcatctgtccaaagaacgttaagccctatcttatcaaaaggaagttcctctgcatatttcttatcgccttggattacccacaggtggaatatttcagcagtgtctataatattatcgagatagccgtattccttctccatctcagaagcagtatcacgcggataacctgtaacgattctgtcaaccagagtattggtgaagtaattctcttcctcaacccacttgataaagtcatcgccgtagccaaagtctttagcatacttcaaaacacaagccttaagctcgtcgccgtttttatcaataagttcacacggaagcagtaaaaatcccggaagcttattatcaaatcttctcttcatgaacaaagtcagtctgccagggaatgtaagacctgcaaaatcatcaggattttgattcggcttatactcaataccggcttctgttgtgtttgaaattatatatctgagttcaggatttgaagcacactcaaagaattcatctgtattctcaaatgggtttatacctcttgtgatacagtcaacaactcttgtctcctccaccttttgaccgtcctgcaaacctctcagatacaaggtgtacaagccgtcctgctcgtttatcatagggataagaccctgtgcgagaggctgaactactacaactccgccgtcaaagtctgcttccttattcaatctgtcaatcatccaatcaacaaatccgcgcagaaaatttccctctccaaactgcaaaaacttctcagtaagctgacatttttcttttctctttagtctctccataaattgttcctcctaaaaatatattaacgttcaattttcaagcacagcttatattagtctacgatcttaacaatctcctggttctcattgctctttgcaacaccgttcactgctaaagtagcgttagattcagcgtcagtttcgataaagtcttttgctgtaggtgaaaccattgagttgcttatcataatatcctttgattcttttatctcaacagcagtgttacttccttcagaagtgagaccgcttactttaaccaattctgatttttctatgattattgaagaagttttttcaacatccaaatgcacgttattaaaacttacgtctttcatattagcgcagtagaaaccgtgaccctttgtcggctcaatatgccaagccataatcggcgcacttgccacatcatggtctccctttgtcatagaacatacaaagttatcaacatggagactggtaacaggcatctcaggaataccatatatatatccggcagcacactttacttcacgcgcggtaacattgcttatgtatatattcttaaataccggagtgctgtcttcaaccggttttttctcaagagagaataactccatatcgttagggtcggttcctccgcatttataataaccgtttattgtaagcggcgcgaacacgtttgtcatcataatattgtctattctaatatcctcaacgcttccgcctctcttgcggcgtgttttaattctaatacctctgtcggttccgttaaacacacagtttgaaatcgtaacatttctaactccgcctgacatctcgcttccgataacaactccgccgtgtccgttattcatagtacaattggttatcgttatattttcgcatggatacttcttctgcaaatagtcgtcctcggttcctgatttcagagtaacacagtcgtcacccacatcaacctgacagtttgaaacatgaacattagaacagctctcagggtttataccgtccgtattaggagaatcagccggattctttattgagataccgtcaatcgtcacattgcggcagcacataggatgaactgtccacattgcagaatttatgatactgataccggaaagtcttacattttcacacataattggttggaaagccctgggtctctgttcatttttaggatttgaccaccagttatatcctcttccatccaatgttccgcggcctgttacagttatattttttgcatttcttgcggcaacaagtccggtatgcccttctctgttatatccttctaggtcttctttagttatcattgggtagtcctcaggatcagcacttcccaaaattgtagctccgccttcaagatagagcgtcatattgtctcccaagattatcgaaccggtaacatattctcccggcggaaaatatattgttcctccgcccagctttttcagttcaccaataacctcagctatttttttagtgttattggttgttccatcccccacaacaccaaagttggtaacatcaagaacagatgaaatagtgttcatttgtaaaacctccgtttttactatatccaaatttttatttcttttttattatcttacttgccgtttaatactctttttaaaatactatatctaacaaaatactaatatataattgttttactatcaatatatctaataaaacataagctttcaaatttaatatacttcgtgttttaatctaatcagccgggtattccgcaaatttcccaacatatgacatcaacgtttccgcctcgtcatgcgtcagctgcctgctccagcccgcccgttcagacacatctatcagatgtccgtgagaatctgtattattatattccaaatatctggtgttcttcgcttctgtcccctcttcaagcctccacggaagccatccaaccggggcgcagtcaaaattataggtacattctataaatgcagtatgtgaattgattccgtcgtcctgcgctctccatgggcgtcccaaatatatacattcacaattttcgtttgcgcttatataacaatgataaaaaacaaaacctgcttctttgttttcagaagtgtttgccgccgttatataagattttgagcgaacacaatttatatcacattcctcaaataacgctgccgcgtctccaaaaataaaatcaacgcttccctcaatataacagtcataaaaaaactgtcttgtttcgctgccatgaatatacatggtatcctgccagcccaaaaaattgcaatgatgaaaaactgatttatcagcaccgcagcttattgcaagcgcctgcgtcacagctctgtcagaatcaattctgttatagctgttctcaaacgttatgttttccgccttaaatccaaccgctgtttcttcaacagtcactgtcgcagatgtaaatgtattatattctacaccattttcatcacaattccccgaagcggcgtcataggtcaatgttacaaagccatctccaaccaaagttagatttttttttgcaatatttatcttttctttatatattcctgacggaataacaataatatccccgtcatttgctgcttcaacagcactttttacagttttgtagtcacgtcttacatatatattcatatttttttaccctaatacgcaagacaactgccaaatatagcattcggcagtatcttgcgttttattaaatttagtgttttagttagatttatttattacttaaatctaatttattatcttactgagcttttgcaagttcagcgttttctttctcaatttcagcctttgttctctcataaacagttgtctgaagttcaataaactcctgcagaccaactttgttcatgtcagaaatatacgcgttccactgagcatcattgttaggatctacatcgcctgagaagaatctctggagatattcatctctcttagcgttaagagctgtctcaaggtcaccgaacttctgctcttcatcctcagtatatctcataggaatctgatcgaagtagtaatacttatcctgtgcctggaaagcgtcccaaagagcttcaactttcttaccgcggatattgtcaaacattgtctgctgttttgcgaattgtgaaccgaatgaaccgaattccttagataaggtcttatctgtcttcttatctgtagccggattactctcgtcataccagcctggaagcatctgcggctcgccgttaactatttcataactttcgccttcaacaccatatgtcatatacatctgaccttcttctgtagcataccagttaaacatcttaagaagtgtgttgtatctgtccatatcgtctgaaataccagcgctgaatgcaggtccccagtttgaatacagagggtctttcttatagatagtacccttttccgggaaagctgttatcatattacctgtccactgccaatcagatactttatcaggatttgttccctttgtcttcttattaaactcgtctatgttataaacatagttataagttataaagcagttatcctgtgcaagtcttgatgagaaagtatccttgtctagtgaaaggatttccttatccataaagccagcgtcattgaacttcttgattgtcttatacatttctcttgcattatctgttgtcaaagcgtatggaacatactctttagtaacagggtcaacatatgaatgctgagttaagataagctcaggaatccagtaagcctggaagaaacctgtgagcgcgctgcccggtgaagttgttcccataccattacaagaaattataatcttatcaggatatgcagctttaatctttgcacaaacatcataaagctcatcaattgtcttcgggaactcagttattcccaactggtcaaatacatcttttctgtaatcccagcacatctgagttttttcctgtctcagtgtaggcaaataatacagttctccgtctgaactcttagcgagcgccaaaacctgcttaaagtcttcttcactccataagtttttccaatccttcaagattggattatcacctgtataagcttcttcaggaatcgggtctaggtatttattggtagcccatttcttatactgaggctctttaccgcctgttgtgaagtctgcttcgttaccggttgaatatgaaatgtttgtctttgtttcccagtcacctcttgggattctttcatattcaagttcaacaccaaacatgtctttcattctcttagcaaaatcagtatcctgaccttcagcatactcggtttgatcctgagtatacatattcatacgataagtataaattttattgccttcgctgtcaacatacgagcctttacctgctgaaccgcaggaagccagcaaagaagaagccagcactactgatgtagctaaagccacaaccttctttaatttcataagttttatcctcctaaatatatttagtttaattatgcttaacccttaacagaaccaaccataacacccttaacgaaatacttctggatgaatgggtatacacacagcataggcacgatagagataaacagcgttgcatacttaagtgaaacagtacttactgttacagtgttaagttcgccggcagcctgcgcttcagcagcaagctggttctccataactatctgtcttataatatactgcaaaggatacagattcttaactctgtcgctcagataaagcatagcgctgaaccatgtattccacatatacacaccatagaacaaacctacggttgcaagtgcagcctttgaaagaggcaaaataatcttaacaaaaatagtaagttcgtttgctccgtctataaatgcggcttcttcaagctcaaccggaacgctttcaaagaacgaacgcataactatcaagttataagttgaaattgcaacaggaagaatcaacgcccatcttgtatcaagcagtccaaccatctgaactatcaagtatacaggaatcatacctgctgtaaagaacattgtgaatacaatcagctttgtaataagaccgtgaaacggaactctgtcctttgaacgtgacaacggatatgcaagcgttgttgtcagcgccagggaaataactgtatacaaaactgtgttgattactgcctgcaggaatgacattggaaccgtcttacctgtaataatttctttatacgcatctaagttcggctcaacaggccacaaaacaactttacctgcctcaaaagcggcttggctcgaaagtgaaaccgagaaaatgtagatgataggatatagagttacaatcatgagcaaaatcaaaaatatgtaaataactacatccaaaataattgatgatactgtattgtcttttaccattttttagtccccctctcttaccacaaacctgtatcggtgagttttctcgataagaagttagcgaaacatacaagtataacgttaattatcgagttaaacaaaccaactgccgtagagaatgctatctcaccctctttaagacccttgttgtagatatatgtacttagtatctgtgaatgtttatatgtcgcaggctgctgcaaaagcaaagctttgtcagcgccgagtgacattatcttaccaatctgcataacaagcagaattacaattgtaggctttataagctgaatagatatgtgccacattttctgaattctgctggcgccgtcaatagtagcagcttcataaagctcctggtcaacagctgaaagagcggctatgtaaataatagcactccagcctatactctgccaaacatctgaagcgatatagaccgttctgaaccactctgttctctgaaggaatggaataccttcttttaccagatgcagtttaagcaaaaactggttgataataccttcatttgcaagacttcccgcacctacaggagtttgctgtgaagacaagaacagtgtgagcataccagcaactgccgcaactgatacaaagtgaggcagatatgatactgtttgtacgattttcttaaacttagcacctctgagttcgttgatgaacaatgctaaaataatagccagagggaacagccaaatgatatgtaaaacactcaatacgatggtattccatacgtagttccaaacatcaggtatggtgaagaatctaataaattccgcaaaaccataattgtctgcccatggacttccaagaatacctaatcttggctgataatctttaaatgccgctaacaaaccataaaaaggccaatactggaaaattgcataaaatgcaacacccggaatcatcagcaacagcaagaactttcctctggaaaatttgctgcattcatttttgaaccagccggcgataccctttttttctttctttgtgctgccggcactggtatcagacgccgcagccgcggccgcagccgcttttttttctttactcaaagcgtattcctccccttctcaataggataataggcaataaagccatttctataatacttatggtattattatataagatttgcacaaataaatcaagaaaaattctaccatttttgcaaatttcacaataaaactttaaatattataaaaattacaagttttttgtgctttttacataaattttatgctggaatttagtctattttgacatctattttgacataaaattataaattacaacagccgcttctgctctattagcataattgagagggttgaaacaattattttggtcaccctgcataattccaagagcgtataaagcactcacgtatggtcttgcccaatccgaaatcatatcagcgtcgctgaactcctctgtcaaatctccgtaaaccactgttgctccgtccacggctctgcatatcatagccgccatttcttcacgcgtaacatttctgtcaggttcaaacgtcagttctgttgtaccgttaatcaatccatatccatatgctttgtttatatactcggaataccattccgacttatcaacatcagcaaatgaaggttcaccctcagtgatcaccgcatttggatttttagcttcgtaagcaccgacgagcatttttgagaactctgcacgggtaacattaagttcaggattataacttcctgttccgtcacctgatactataccctgctgagtcaaatttgcaattgcgggttcagcccattcaaatccggctaaatcgctgaatgcaccattggagattctaaaatcactcagtttaaattcagacaccttaaagtcttctgctgaagctccgaacagaccaaagtaataattttcacttaaatctgtctcttcttctccgactttcagccactcagctccgtcctgagaatactctgcggtaactttattgcccgtcttgtttattctgagccaaacaggtgtatttttatatttctgctgacctattttttcatatactttgcccttttcagagttctttgtaaacaattctccattataaatttggaaatagaacgcataggaattgtcgccggcgctcagtccgtctctcagcaaaaatcctacctggtcatactcgctgacgtcttgggcctcaactttgaatgaagcagtaaaatcaccattcatacctgtataagcatacgggtactcctcgtttgcaacatccgctactccgaatcctgttccgtatatttttactgtgccgtctgaattaaaatcaaaagcacctctcatcttgctgtctccaacactgacagcatcccagcccggcatagctgtaaggtcagatacgcctatacttacagacgcgctgtttttggctccgtccttatcataagcaacggcagtaacccagtggcttccggattccaatccgtcaatcttaacattaaacggagctgaagcgtcttcctgatacaacttaccgtccacatacagttcagctttctctaaagcttcactgtcgcctgaggttacattagctgttatttcatctgttgtataatactggttttgttcagagcttattccgttacggtttgagcttatagaaagctcaacgtcgggtatagaattctcgccataattttcaagagtcaagtccttatatttgccccaagcatatgttgatatttcattggtttccttattgccgtcctgagcaactccgccgtaatttatacctgagaagttaaccattgtctggctgaggaggttccagtctataccattctcagaatgataagcggatactgtgctgccctctttaaccagctttaaatatctcggcaatacttcaagctttaagaattcacggttatactttccgtcttgtctgtatttgaaagctatacctgagccgcccttttctatttcgtagttaaccataacgaaatctgacttttcagtcaactcatcacgaatcataagtccgctggcacagttgttattcagccttgaaactgaggcaatctgtgtagaaagaactgcgttttcatcaacaggctgatacatatatgagaatgaatcagtagtcggatcgcccagcgctatattaaaatcatttccgggaccgataagaccgctgctcttaactgtataaacgccgtctcggtatgaatagcttccgtccattgtggactcgcctatatcggcagtcagccacggcgaaactgaatctgtataattaatatttataacctttatctcagaagttgtagcttctccggcgctgtcaaccgctcttgccgacatatacgctattccctcttccgcattgttcagagtaaaagtatatgggctggattcagctgttccaaccatctcatcatttttatagaactcaaccttagaaattgaacggccgtcagctgctttggcttcagctttgagttctatcggctctccgtaattgtaacacgtattgtttttaatattcaaagtaacttcaggattctgaggctcagccgcagattcaactataccgttaagataattttccaggtttgtatatccgttgtctgcaattatctttccgtcagccggatcagatttatttaaaccgttctgctcctcataactatccggcattccgtctccgtcagaatcaagaggtgcttccgcgctgtttaaagttggccatccgccgacttcagattcattattaaccgctcttccggtaccgtttttggtgtcattaataactcttgcatcatacgaatcacgtctcggaacagtagcgccagcgtcaacaagtattttttcgtatgcttcctgggcagtgtctatattatccataggaataagcgaatcatagacaggttcgtcaacatagttcggagcttctgcaccctcgttcagaataacgccctttagattatcgtttgtaacctcactgtttccttccaaaacgtttccgctgaaatagaacactccggcctttgacggattccaaattctgttctttacatccgcatttgtaataggaccggttttgtaatagttatttataacgtttactgtagcttcctcggctccgtaagcattattaaatccccagttgtaaataacgttgtttaccatatcgttgtcgtttatcccctcaaaatccgggtgtgtgcttgacaatgacgagtatctcggcaaacggctggtgtgtgtagcaacaaggttatgatgatatgttacattagccccgccccatattccgccataaccatgacggcctttggcatgaacagcaagcgcaaggctttcgcttatcatacaccactgaactgtggtattggctacgccatacaaagacatggtttcatcagttgaccagctggtagagcagtgatccagaattatatccttttgataccttgcaaacacagcgtcgttttctgcatgagaaatatcgccgggtctgaaacgcatatatcttatgataacgttatccgccgcaataacaatattgtagtctccgacacaaataccgtctccgggagccgtctgacctgctatagtaatattgggctggtccagctttaaagcagatttcaaatgaatggttccagaaacatcaaatactattgttctgttaggtttgcttaccgcgtctctaagcgaaccttcgccgtcatcgtttaaatttgttacgcggtacacttctccgcctcttcctccggttgtatattttccgccgccttctgcgcccggaaatgccggaagattaattgcctgagcctgttcaggcgtcataaatgtttcattttccaaagctgcttcttcagcaaatgcagccggcattatactcacaaccatcataacagctataagtaatgaaacaatacgtttaatactaaagtttcttctcataattgattcctctcttatataaagatacactccaaattaattttcttatgtttataaaatatccgatactccggagctaaaagctccggagttcttacatatataattatacgattttattcatagatgtatgtctcaaaactcaatccatacaagtttattcctgcgtctccataaacatatatagttgtggcttcaccggtataggtatactttgcgctcatttgagtagtcagaatagtcttgttctcacttccgtcattgataacaacgcttcttgttccgctgcttcctgccggttctccataaacgacaatatcagtagttccggccggaacttcaaacgaaacacatttgctggacttgcttccgggaccgcctattttatatctcttagagaatgatataccgtcaattgtttttgatttgctctcaagagttccggttgtagcaactgaaagacctgcatatgtctttccgccctcaagagatgttaaaccgctgaattcctcgcttgaaccgaagttccagaaatgagaatcgagcacttttttaacgtttgatgactggctgagctttacgctgacattatcaatataatatgaagcagtcataccggcttcaggctcaaacagaactgcgtttgttacatcgtatttcttttctgtattaatctgagcacggaaatcagaactttcaataccgctcatatcagcgcacacatttccatcctggtctttgagtaccatctgtgctgtatcaccgccaaatcccatatcagcaaccaaatcaatatgataccattttgaagcactgtattcataccctgtggactgtcctccaaaataaaccagtccatcgtccgcgaatgaaagcttaaacgccttatctcctgattttactctcagataaacattcattccggtcttgtcgccggacatcatcaagtcagctccggcagtgattatattagtagaattctcaggcaaaatatactcgcggaaaatatatctcggagacgaatagtcagaattagtagaaatcttcatctttcctgtctcgtttccgcttatgctctcgtttgtccaggacgggttaagaacgttttgctcctgcttctgccacatccaatcaagaccgtaattaaagttccattctaccgcgcttgaatcagatacttcctgcgctgtaccgtcaaacgggttacaaattggaatcaaatcactcaaattattccaaagaaatattttatatgtatccccatttacgcttccaacatcaacactctcaccgcttatctcagcgttcttagcgtcaaccagaaccccattctcatcgtatccgcacgcaataactgttcctgaggtgaaaccattgcccggattaatagtaaccacgccgttttcataactctttatatatgtttcggttccgccgccaaagctctttaattcttctgttgaaacccagccagcgtcagaagcggcgcttccttctccgcttactgtaccgaatcccatataatagctgtcgcctataccgtcgcactttatactggttaacagcacttttgtcttataaacggtcgagccgttttcagtttgatatatatttattgtatctccaactttttcagcaataaagtataagttcgcagactggcctataacgtcagttacatcctgaacaggagtcatctcttcgcctgcgccgcttctcttcataagctggtatctcggcttaccgtcctcaccgatgtttccgccaaagtaatatgttacgccgtcagctgttaagtcgttctttataacaactcccatttgtttgccgtcctgcatacggcttctgtaatatatcctgttgtcgccgctgaactcctggcaaaggtatccgaatttgtcggatgttccgccaatactgccgcttgtatctgtagctattttataagtataatcattagttcccaaaacgtatgcttttacgtcatcgggagcatttcctatatcaactatctgccaaggtgaaatatcctgagacacaacaacatcaacactatcagcacctgaacctaaattttcatcaaagcaatatacttgtaatgtgcctttagctacgcctgtaaattcaacaggaatattaatcgtttcttctctgtccagctcgtttgtactggaagcaagcggagcaccgttaaagtaaacccatacctctgttacctttttacccttatcaggagtaacctttacttcgacattagctgacaaacccaatctgtcattattttttatattaacaatctttgcagcagggttagtttgctctgtcacaagctggcacacattaaactttgtaactgtctcgccttgctccacagctgaaacatatgcagaaaccgcagcgtttccggtttgttctccaacttcggcaaccttttcccattcagctaagcttgttcccgcatatagcgacagaacgccttctgactttgaaatcttaaacaacttatatttttcaatgctcttggctgcgccgtcccaaatctgaatatttccggcttctccatagtaaataacttgttcaaagttatcattatacatcttgcctataacaaatttagttccgctggtttcatccagtgaagaaataccgctttgaacgtttatatttttattagaaagtttatctattcttgcaaccatgtcatagtcgccggaaatattagatttctccatctttccgccgtctaaaacagtatagtcatctccgtcataccacgcattttcagcagtccagccctccggcactgtatcaccggttacagagacggttttaaccgggctgaaaatataacttccgtcgttcttgataactttcactgtgaaatcattatcccctgttggaagttcagaaactgtaatcgctgcagctccgtttacaattgatgaagtttctcctaccttcttgtcgttgcagtacaattctgctttttcaatatttgaaactcctgcacctgatatgttaacagtaaagttaacttcctgattgctttgcacaacgtttttatcggcgcttataccagcttctatatcggttacaggagtttttgttattgcctcctcaacaaatatttcaagccaggtaagtccgtccggaccaatattcttgctgtcgtgaggattagttttgtcaagacccattttgtcttcccaagtatctgctatgccgtcgccgtcagcgtcataatcaccagctctagtctcctgcgcgagcgccggatatcctctgccgtcataatttgtggcgccctccggtatacaatctgtagggtcgtctacaagaccaacgctgcctttgcttccgattggagctgtgcgggtttcaacctcgcctattattcttgtatccacttcgtcacgctttggaagagtggctcccgcgtcactcagaacctcattataaacatcttctgcagcgtccagagttataggataattattatcatattcctgatattgttcatcaggcgtttcaattttcatattggtcttatccgcaacactataaacatttgttgcaacataaacaccggtatgcaaatcatcctgccagttgttctggttaacaagctgggcgtttttataatcgctgtcgccctcgtcaacatctattttatttccggaagcatatacgcttccaagcatattcggcttatacttctgcccaacgctaagctcaaaaattcttgagcgttttcctgccggtgttgccggacccggtctgtaaacattgttctgtatgtatgtcttagctccgttttcagttccgtatcccgccttatcgccccagttataaatgacattatttttcatatcaaccaaagtttggtcatcggtatatccctgggtcatagccacagtttcagatgtaccgattttaggattacggctcttatggctggcaatcagattatggtgtatagacagatttacgccgccccaaattgccgcataactgtgttcgcccttatcatgaacactttggttaagcgcctctgctataatacttctttggatagtaacatttttaacagcataggctgacaagttttcatcagtaccccagcttacactgcagtggtcgataataacattttcgcagtcgtcagttatttccataccgtcctgcgctcttgtgtctttgccctccgcatcatgagctccgacgcggaaacgcaaatatcttaaaattacattatcggctccgaccttaacattgttcgatctgaagcagataccgtctccgggagccgtctgccccaatatagtcatattgtcatggcttatagaaacattgctttttaaatctatatagccggacacgtcaaagacaactattctgtttccttttgaaactgcatctctgaatgaaccctcaccactgtcattcaaatttgttacatgatatacctcaatctctccgccgttattataagcgcctctggctccctgggagtacattcctccgccttcagcgccgttaaaagctacaacgttcataatatttccgcctgcgcctcctccgccggctactgtctgcgcagcaaaaaccggcagggatacagcgcttaaaccaacagcggcggcagtcagcagtgagccgactttacgcactaacttacctctttttttcattagattttcccctttcctatgtatttaaataaataacaatgtctcagttcaacgattccgagctgaacttcataatataaatcaaatgaaacctgtcgcctaatcagacgaactgattcttctatataataaaaaattaattctcatataagcaccaaaaccgcagcaaatcacaaacatttgccgcggcagtttccggtattgccggaaacgtttggcgctttaccgacatttatctattcatttcatcctgatgacctgtagctttatggcttgcgattatgctgtctatttctcccaaactgctgcaggacatatcgcccattacagtattcttaaccgccgacatagcgtttccatactcaataaccttctgcatatcatcacaggttatcataccatataaggctccagccaaatatgcgtcgccgcttccgacgcggtccacaacctcaatattcatatatggctcttcttcatagaactttccgtcatagtatatcttagatgagaagttatgaattttagggctgacaacgtcacgccttgttgtgcacacaactttgcagccatattcttcgcagtaactcttcattatttcctcaagagttcccgttttctgaagcattcttcttgaagtttcctcggacacaaacaaaatatccacataagggaatacagaagtaacagtttttctggccgtttcctcatcccaaagtgacgcgcggtaatttatatcaaaggatattaccgctccgccctctttaaacttcttcataacctctatagtggtctctctgagctgctcgttaagcgcaagagttataccgctgacgtgaaacacagaagtctttccgtaaatagacgggtctatctcgtctatcttaagagtggtcattgcggaattggctctgtcgtatataacagaagactttctgggatatgcccccgtctcataataatatattccaagcctgctttgtcctgagtggtcgtatacgatacagtcgtcgctgacgttgccgtatctaatcatatttcttataaagtgaccgattttattttcgggaagctttgtaataagagcgctgcgaattcccaaaacagctgaacccgaagccacgttcagctccgctccgcccgcttttttgtcaaacgtgtagctttgagaaatcttatccgttcccggcggcgacagacgaagcataacctcgcccattgttaccaaatcatattccttgtttgaatttataaagtccataatatcctcctattttaactcccctgtcatcaaaatcctaaatttctattccgaaatactctttagcgttattgaaagatattcccttaaccacagtctcaagagtgtccatatcatcagggaattctccgttttcaacccatgtgcccaaaaggttgcacatgattcttctgaaatactcatgtcttgtgtatgaaaggaagcttcttgagtctgtgagcattccgacaaacttattaagagctccgaggtttgccagcgctttcatctgctctgtcataccgtctctctggtcattgaaccaccagcccgaaccaaattggatttttccgggaacttcattgccctggaaatttccgagcattgtagcgagaacataattatctttcggattcaacgtatacaatattgtcttcggcagtttgctctccatctcaagcgcgtttaacagctttgaaagaggagccgcaatacaatagtcgcttatagaatcaaaaccggtgtctgcgccgagtttctcaaacattctggtattattgtttctgagcgctccgatatgaagctggaaagtccaccccaaatcataatacttttcaccaagcttaaccaaagtcttgctcttatatgcgtcagtctcaaactgggtcagtttttcaccgttcattgcctttttgaaaatagcctcaacttcttcatcagacacgtcctcaaacggaacactgtctaaagcgtggtcagaaacacggcttccaacttcattaaagaagtcaattctcttatatacagcggaaatcaaatcctgataactgtcaatttcagctcctgcagcatctgcgagcttctctatatacggcgcaaatgtaggcttgtcaatattaatcataaagtcaggtctgaacgccggcaaaactttcgcctttatatgacctttttctttaatctttaaatgccattccaaattatcaacagggtcgtccgttgtgcagataacggcaacgtttgaatcgtttatcagcttagacgggctcatttgagttgctttaatatgagcgtttgccttttcccaaatttcatcggcagtatcttcgcgtataacagtatctataccgaaatatctttgaagctcaagatgggtccagtgataaagcggattgccgatgccatactgcaaagccttgcagaaagctctgaacttttcctggtcgggagcatcgcctgtcatatatttttcatccaatccgcatgaacgcatgtagcgccatttataatggtctccgcccaagaatatttgggttatattatcaaacggcttgtcctcatacatcatttgcgggctcaaatggcagtgataatcaaaaataggcatgtccgcagcaaaatcatgatataactttttcgctgtctcattgctgagcataaaatccttatccataaactttttcataggtatacctccaaatattacaaaatttttattactttataataggtttatatatttacaatatagttaagcgtatgatagaaattatttacaaaatattcataattccctcacatagctatccttgtatattatacactataacacactaatattgcaaatgtttttttaagtatattaacggattaattgacttatgcgaaaacaaaacctttcattttgataatctgtatttctctttagcaaattttctgtatttttagaaaaactattgatttattgccacggctatgttataataaatcagtacaaaagatttggagggatagcccatgggtttaccagaaggacgcgacatatatattgaccacgaggaaaacgacaagccttatgtgatgaagaattcacacatacacgattactacgaaatctactatcttatggcaggcacaagaagatatttcattaatcacactctgtataatatggagccgggtgacgttattcttgtcaataagggagaccttcatctcaccacgatgatttcatcagaacattactatgaaagatatttgatgacgtttaacgataactttgttgagcgcgtttcccaaaacattgaccgggaacttttcatgaacgcctttgaagttaaaaaggtacacgttcccgtctctaaaagatacgcatttgaggcccttatacataaactcagtacagaatgcgagcgcaacgatgaatatgcagattttctcgcatattcgcatatggctgaacttataatatttcttgacagatgctcaagccacagcgttgttccgtttgatgacatcagtgttcatgaggagaggattcagcaggtatgtaaatatattataaactattataaccagcagattactcttgctgacatttctaagatggcatatatgagcccgacttatttttctaaaaagtttaaaaaagtaaccgggtttggatttaatgaatatctaaataacgtccgcataaaaatggcgacaaacatgcttgttgagacccagtattcagtaaccgaaattgccagattctgcggatataaagacagcaattatttcggcgacgtatttaaaaagataatgggggtttcaccaagcaaatacagaaaagcgaattatacattttaaaataatatcagcgtaagcctgacaaaaacgaaaaatttacaatataaaaagcaccttctttggttttatctgccatgggaggtgttttactttgtcagaaataaatataagatacataaaaataaaaccggctccgcgaaaacggagccggttaactgtttatattttatattttagaatcagaataattattgaattatacttacaagtttatggactcgtttatgttactctttcagatttcataatcattaaactttttaaattttccgaattcttataacacgataacaaacattattcttataacccaatagcaaacattcttaccatcagaccacatcgtaatgtaaaaccgcaaatcaaagcgcataaaattgttttattttatattctcaaaaataagtgaaaataatcttgaacataattattctaaattttcatcttcagccgcaccggaatcaatttttaattctacagggttcacatgaaccatgcagtgtttgactttaggaaaattagcttcaatcgcattgtgaacattctcggcaatttcatgggaatctctaagcggcgtattctcatccgctcctatctccacatcaacatataattttgaaccaaacattcttgtcataagcaggtcaagcgaaatgaccccttcctggcttttaatcaagtcggacatctttctttcagtctcatcgtcacacgacttgtcgaccattttgtcaagcgcttctttgcagatattatatgcggctttcacaatgaacaagcatataacaacgctggctaacgggtcgcaaataggaaaacccaatctagctcccaaaataccgataaaacttcctactgaagaaagcgcgtcgcttctatgatgccatgcgtctgcaagcaatgccgtagagtcaaccttttttccataaaaccttgtgtaccaaaacatgccttctttaacaacaatcgaaataaccgccgcaactaaagctaacgccccgggcacagccaagtctccgtaattgccgccgaaaatttttttgacgcctgttattccaactccaataccggttataaacaagacaatagcaagcacgattgcagctatacattccattcggtcgtgaccgtaagggtgttcctgatccggatctttcgccgccgcgttcgccccaatcatcacaataatagtgctgaacacgtccgaaacagagtgaatcgcgtcacttatcatagctcctgaatttgctataacacccacaacaaactttatagctgaaagaagcacgttaacaactatacttatgtttgaaacacgcattataatctttttgctgctttggctgttaagtacctcgttctccataatcacactccctatgtctattgaaatcaatacttataatatgtatgctgaaaaattaattttatgacatattttattccaaataatctttcagctttttactgcggctgggatgacgaagttttcttaaagccttagcttctatctgacgaatcctttcacgggttacattaaactctttgccaacctcttcaagagttcttgctctgccgtcgtccaaaccaaatctaagtctaagcactttttcttctctcggagttaatgtgctcaaaacgtccaccagctgctcctttaacaaagtaaatgtagcggcgtcggacggcgccggtgcgtcatcatcacggataaagtcgccgagatggctgtcctcttcctcgcctatcggcgtctccaaagaaacaggttcctgagcaatctttaaaatttctccaaccttgtcaaccggcatattcagctcttttgcgacttcctccggtatcgggtcgcgtccaagttcctgcactagctgccttgaaacacgaacaagcttgtttatagtctcaaccatatgaacaggtattctaatagtcctcgcctggtcggcaatcgctctggttatagcctgtcttatccaccatgtagcatatgttgagaatttatatccctttgtgtaatcgaacttctcaacagcctttataagacctaaatttccctcctggataaggtcaaggaacaacataccgcggccaacataccgcttcgctatgctgacaaccagtctgagatttgcttctgcaagcttgcgttttgcgttaacgtcgccctcgctcattctctttgcaaggtcagcttcctcagcccctgtcaaaagattaacttttcctatctctttaagatacattctaaccgggtcgtctatgctaacgccgtcaggcacagacatatcctccagttcttcctctgtaacctcatcgctttcatccacaacaggttcagggtctatgcttccgacgatttctataccctgtttctctattatttcatatattttatctatctgctctgaatccagttccagttcttccagcttgtccgcaactgttttgtattcaatcattccgagctttttgccgtcctccagcaaaccttgaattatctgagcctttttcttggcaacggcaatatcaacttttttcgtctcagccccctgtttttcaaccggcctagaactttcggaaacaccggcgccggtttttgaagcctgttttgacgatttatttgtcacgtcttttgaaccgctctctttagcttccgtattctcaacatccataagctcttgattttcagcattcttatttaattcttcattatttttcataatatataacccccgttattcttttttcttccgctttagctcaaagagccgttttaattcttcttcatccccggaactaatcgccttttctttaatacgttcttcttttgataaagcgataatctccaaaggttttttggaagcttcatatttatcttttatatttttatcacttattaaaatattggatatctctcccacattctcaggtgagcatctgttcagaatatcattcccttctgcaccctcgccgctctcatataattcaaacaaaatcgaagccaacctcttatgtaattctgaacgtataaaatcatcaggaactattccggactctttgacaagccctataacccttttatcagtcatcagacacaaaagcagtctttcagcattaaaaagctctctgtcccgatgactggctgaaactcctcctgtcattatgtcccgctctctccgttgtttattttcctcccggcgtcttaaaatagacttttccttattttctattccgcttataccggctgaaatactttccggactgatagaaagctcttctgctattttgctgatatatatttccctctgagcctggtttttaaccctagataaaattactgacacctcattcaaaaagtcaaccttatcatccaaatcatccaggttatattttaactccgcctcggcaactttatactcaatcaaaggccttgccttttcaatcagaacactaaacatatcagggcctttcatctttataaactcatccgggtccttgccgtcggttacagtcagcacacgcacctttacgtcagcgtcaaacagtatatctccggctcttattgtagcctttttgcctgcttcgtcattatcgtagcacaaaacggctcttggagcgtaccgtttaacaagtttcgcctgttcaggtgtgaaggccgtgcccaaagacgctacggcgttattaaatccattctgatgaagagacacaacatccatatatccctccataagaagaagcctgtcagcctttgcgtttttagctatattcaaaccaaatagattatcttttttcttaaacaccaatgtttcaggcgtgttccaatattttggagcgtcggtaccgtcttttactacacgtccgccgaaagctataacattccctctgacgtctataatcggaaaaataactctgccgtcataaaatgcgtcataaaatgttccgttatcacgctttttcaccaatccggcgtccagcatatcattttcattatacccttttttctttaaaaaatttattaaatttgaccagccctcaggagcgtatcccaatccaaaccgctttatcgttgaattactaatcatgcggtttttcagatacgttaatcccggttcacccgccggacttgctaaacactcaaaaaagtatctcgccgcctgagcattaatctcgtatatcttttcacgtttttttgatatggccagctgtttctgcttgtccctgccggttctgttgtccggcatttccatatgtaccctatccgccaaatattttaaggcatccataaaatcaaggttcatcgccgcctgtatgaaatgaataacgtttcctcctgcgccgcagccaaagcaatgaaacatctgtttatcaggcgagaccgacaaagacggagactttctgtcattatgcagagggcagagccccatcatattattgcctgtgcgttttaaagttgtatactcggaaataatatcaactatatcgtttctcattacaacttcatctataaagctttgaaaatcagaaccagccattattatttcctttctaaaaaatagtattttaaacttaaaatcaatttacccaaaacttaggtataaacagctcctcataccttgcaatagcgaacgggtcgctcattccggctatataatccatagctattatactattatcgtctgtcctgctgttgtttctggcgtcggcaggaatcaggtcaatatcatttacaaatcttgaataaagcccttcaataatattttttgccttatcctcttctgttgcaacttctgcatttttattcaaataaacattgtcaaacaaaaactgtctcagccccatcatcgcgtcatatatatcaggctccataccaatatcatgctcgcttcctgagatagccgcctttatcatggtatctattcttgctgaatgtctgttgcctaacacatcagaaaactctttaggtatatcgttctcgctgagcaaacctccgcgtatcgaatcgtcaatatcatggttcacataggcgattttatcagcgaccgcaacaatacgcccttccagtgtgtccgctctttttgctccggtgtggcatacaataccgtctctcacctcatatgtaagattcagtccgcctccgccctccaaaacatcaaccactctcaaactctgctcattgtgtttaaacccggtcgggcaaatctcgtttaaaactctctcgcccatatgcccgaacggagtatgacccaaatcatggcccagtgcaatcgcctcagtcaaatcctcattcaaacaaagcgagcgtgctattgtcctggctatctgagcaacttccagcgtatgcgtcagccgcgtacggtaatggtctcccattggggatataaaaacctgcgttttatgtttaagtcttctgaatgcttttgagtggattattctgtcacggtctctttgaaaatcagttctaatttcacaagagttttcactgcgtactctgccttttgactcgctgctccgagccgctttctcagacaaaatttccctttctctgttctcaagcatttccctgacgctcaaacacgacacctccgcataaaacaatgttaaactccctattaatactcgctcttatactattctacaaaaatagattttttccttttatctattgacaaaatgtacttttaataataaaattattttatattactaattttgaaaggtgtttctatgattcctcctacattatcaccaagactaaacaaaatatctgaactcataaacgattcagacgtaacagcggatataggaaccgaccatgcttatctgccggtatctttagtatatagcggcaaatcaaaatatgtcatcgcctcggatataaaaaccgggcctataaaaagagcggaatcaaccgtaaaaaaatatgatatgtctgattttatcagcctcagacaaggcgcaggactggaaacaataacccccggcaacaatgttgatacaatagtaatagccggaatgggcggtcttgtaatctcaagtatcctcgagaactcaccggaaatcttaaatcaggcaaagaaaataatactccagcctatgactatggttcctgaacttagggattatctgtataaaggagactttaaaaatataaaagaatacctggcggttgaggaaaacaaaatatataatattatttcagccgaaccgggtaaagataaatatgaagagccgtcgcctgttgagttattcctcggacgcagtcttataaatgagcgtcctgaacatttcagctcttatgtaaagcggcaggaaaacaaagttctgaagattattgacggactcagcaaatcatcagaacctgaaaatatagaaaaaattaggtattataaaaatttattatctgatattgaaaaatttatcatcggctaggaggaatttatatgccaaaagtgaaggatattgccgaatatattgaaagcttagcccctaaaaccctggctgagccttgggacaacgtcggactaatggtcggtgatatggacagtaatgttgagagcgtatacgtaacccttgatgttacttctgaaaatattgaagaggccgtaaactgcggggctgatttaatcgtttcacaccatccgcttattttcacctcaataaacagagtgattgaacaagacgtcacaggaagcattgtcagaagtctaattaaaaatgacatttctgtatatagcgcccacacaaactttgacatagccgacggcggaatgaatgatatattatgcgataaactcggcctttcaggggtgcgccgctttactgaatctgaatgtactgacccattcggaaaaccgcttgaccaaatcggacgggtaggaatcctagatactccgatagaaatggccgattttgttgactatgtaaaaaatgttttgggatgtatggctatcagctatgtgggaagcgaatccgaaataatctctacagctgcagtgtgcagcggcagcggcggagacttgatttataacgcctataatgccggagccgacgtttacgtgacttcagaaataaagcaccacgaggcacagctggcattggagcttggaataaacttaattgacgcgggtcattttgaaaccgaaaatattatatgtgattttatggaagactatttgctaagccgatttgatgatatttcaataacaaaatcaaccatgctgccttataaaaaaagataaataagtatctgatgcgcttttataatttattttaacttaaattcttaatctacgaaccatttatattagtatcaaatatatcagttttaaagtttatataaagaattttttacagattatattatacacatgcagttgcttcattttgtactttgaatctaatacagtgtgaagtcaacagatagctagatataatttaaatggtgtttatagtgaacgacacatcggttgggctgtgaccacactttttaaagtatgtgtaatacaactcactttgtattgataaacctacaatgtcaattgtggctacacttttaaataaaagtgtatgtcttataaactatataatgtgatataaactataaatgccaataattaacttcgttgatataataatcaaacttagttgtgatgtacaaacgcagtacaccgcgtaaggcgcgcagtcgcggaaaatttgtatttagaaaagattaaggacaacttttctaaatatattcacgctttgcgtgagatggtagctcacctaacgaggcagacgtcgtctgccctaccgatgttcattataaacactgtatatacggaaataattgaaaatgaacaataaagtttatcgaaaagtttaggtatataataaaaataaatattaaaattctataaaaatgtggtatagcaagcatcggtagggcgtgcgaagtacgccgcgtaaggcgcgcagtcgcggaaaatttgtaattagaaaagattatggacaacttttctaaatatgttcacgctacgcgtgagatgatagctcacctaacgaggcagacgtcgtctgccctaccgatgttcactataaacactgtatatacggaaataattgaaaatgaaacaataaagtgtatagaaaagtttaggtatataataaaaataaatattaaaattctataaaaatgtggtatagcaagcatcggtagggcgtgcaaagtgcgccgcgtaaggcgcgcagtcgcggaaaatttgtaattagaaaggtttataacaaactattctaaatatattcacgctttgcgtgagatgatagttcacctaacgaggcagacgtcgtctgccctaccgatgttcactataaacactgtatatacggaaataattgaaaatgaaacaataaagtgtatagaaaagttgaggtttataataaaaataaatataaaaattttatgctagatggccctaacacttctgaccgctttattgtagtctttccatttttattgtgtgtccagtaaagactttgtatatattttaacttaattcttaatacatattttagttttgactatgcttataatcactgcaaatttattttttaatatatgaaccgtttatatgagttccaaagttatatatgaaaattataacgtatcagattatataaactcagcaaatttaatttatttttataatctaaagtctgccggcggcggaacatttttgcttggctcttctaacaaaaattttgccaaagttggtatcttttctcttatctcttctgcgataaaacccgcataaacaaaagaaccaaatctgttttgatgcgtattgtcaatctctccgaattctcctgactgcattatttcattatagtcctgaggccaggctttaggcctgccgtatcttgattcgcctatggtgtttcctgaaccgtcttttaatgactgcaagtatttgaaattctcttccccaatactgttaatatagttttttgacctttcaaacaactccagcacagtgacgtcttccgtttcgccaacctgacgaattgctctgatataggcatattctccgaattcgtctgtccctccgtgattaccgggaactgaagcgatttttccatctttaaaaacacctcttggaggaggtgtgagcaaaacaggcgctgcaccgcgctttcttattttatcaatataaaattttaaatagcccttataagtcgctccgcactcaaaagaataaggcgtgtttccaattggcaaaactgtgggataaattccattagaatcagacgttccgagcggcgtgtgtcttagttctcttttttcatgtctggcagaatcatcatcattatggcaaaattgaataaatacaaaatctccttctcttattagttcataacacgggcctaccccttgaggaaacatttctttagtaaagagtccattatctataaatctgccgtcatttaaaaaacttctggagcttttaccgccttccgcgcatgaaataaccgaaacaaatttatcatcaaaaaaacttcctaaatggtcgccccagccccctataaaattttcactgtctttaccatatgcggtaactatcgaatcacccaataaaaatactttaatcataataacacttatccgtttcccaataatatttagatacaaaaatccttctttttatgatttactatcatatcatattataatacattattttatattaaaattcaagcagacatttgactataaagcaattgacattataagacaaattttatataataattaggtattaatttttgtctgatgaagtaaagctttaaatccatgtttatttaacttattttatagtattcattcaaacgtatttcgacgctcagtaattgaatttttcatattttaacgcttatattaacggttctttgacgaactttcggcctatataaatttgatacaaagcgaattacaataaatctaaaattattaaacttttaaatatattataaaaaggcaggtatgactatgattacttttatagccggattaattattcttattgccggcggagctgtttacggaaaggtctgcgagaaaatatttaaacctgatgatagaacaactccggcagtaatgttgaatgacggagtagattttgttcctatgaaaaagtggaaaaacagcttgatacaactcttaaatattgccggaaccggtcctatattaggtccgattcaaggaattttatttggtcctattgcattcatcactatacctatcggttgtgtaatagggggagcgtttcatgactatatgagcggaatgatttccgtaaggaatgacggaaaacaaatgccgtcacttattcagcaatttttaggtaagcatatttatgttgtatataacatatttgtctgtttgctaatgcttttggtcggagctgtttttatctatactcctggcgacttatttgtaaccgaaattttgaaaggtaacagtggattttcaaatccagttatttggattgtttacggtgcaatatttgtttattacataattgcgaccctgtttcctatagacaaaataataggcagagtttaccctatctttggggctgtactgattttgtccgctttaggcgtatttgcgggactttttattaaaggctatccgctgaatgaaatctggtctactggagttgtcggcatacatcccaaaggtctgcattttattccaatcttttttgtaaccgtagcctgcggcatagtatctggatttcactccacacaagccacccttatctcaaggacaataggcaatgaaaaagagggcagaatgactttttacaatatgatgattgctgaaggttttattgctatgacctgggctgcggctgcaatgggagttatgaatcttggacttgccaacgctgacaccccggcgactaacgttgttggtatagttgccaacagccttcttggcagaataggcggaatgattgcgataataggcgttattgtccttcctataacatcaggtgacaccgcgcttcgctctttaagactaatggtttcagacgccctgcatattgaccagtcaaaaaaaagaaacagattgatggtatcactggcaatttttgtgcttgtggcggcactgcttttattctcaaaactgaatgctgacggattcaatatactttggcggtattttgcttgggcaaatcaaacaatagcaatatttgcattcgctatgattgccatttattttatacagaacaaaaagccatatattctcgcaattattcccggaatgttctacgcgtttattatcacaagctttattcttaacgctcagattgggtttaacctttcctggacaataagctatataattgcaggaattttaacagcagcatatggatactttataatacataccggcaaaaaatctttaaaactgcaaacacaaataccaaattagaataataagataataacaggtatttactaaacaaatttgttagccaatctattaaatgtctcaaattaattatgatattaaataaaaataagacttcaaacaatatgaactgaccttaaattgttatatttttggtctacctttttgggggtaagttcattataatgaagtcttatttttttctattcatttattagaaaattaaaaacctttcattttttctgtcctaacaaagcggctgccattttattcaccctgatatttttgaaccggctaaataaaacggtttatttttcaaactctataataatatttccgctgtcagtttcggcgttaagtctcttatctccgctgttcacagcgctgcccaaattattattgccgtatttgctgttggatgttattatatactccgtctgagcaccatttatatttcctcttatatttccatttttagatttaaggtcaatataatctgaggtcaaattatcaaatttaacatcgccgttatcgcttgcgtctattaaagctctgcatgaaacgtcctccattataaagtttccgtacgcgcgtttgctttcaattgtatcagaaactttaatactgctaaaccttatatttccacttttagcgtcaacagaaagattttcaaagctatcttctgtaagcttcaaatttccataagtgtttttgatttgagtatttggaaagactgaattatcaatatatatgttcccatatccgcttgtaataacagcactgctcccgctctgaccggctgtagaatttaagatactgatatctccgctgtcaatttccagtttgaaatccgaaaaagcgcagtcctccatacttactctgccgcttttgccaatatactttaaacttccgtttaaactttccaaacttacatcgctgttaccggcgtcaatatcaaagttctgaatctgcccctgcggaacctctatatttacaacatatgttgcgatattaatactgaaaaggttatcataccactttgaaccatatttatagtcaactttcaaaactccgttttcaactgaaacactgcagcttcgctttaagtcttcactataagtaactctaaccttttcaccgctgtatcctgatatttctactctgtcaagggcggaatcaatatccatagcagttatatccgaagcgttaaactctacgctttgcgccttcaggtcaaccggttcaaaagccccgcccgcaatagacgcgccggcaataattattcccgaaacaaataaaatacacgctgtaatgattaacttcttcatattctctcagcctccttgcgtataaatttatacttgatttttctgactataaacattgtgaactgtattagttttttagcgcaccatacacaggcaaaaaatccaagtatcgctaaacctgcacaagcaattgccgtaccaagaaaaaacaaagcttttgctatactctcggcaaacacaaaaggcatagcaataacggctaaaacagctgaagcagcaaacgcaacgtctgcggcgaacaatgatacaacaacagaccaaacagatacatacagcgccagtaatgacgcggcaaccgctatcaagattgaaagccatatcggagacccgacaataatcaatataatcgcaggaacactaaaccgcttccccttaacctcccgggctacaagctttcgtattgacgtctcgtcagtaatccgtcctgctattgtatccgcgtcctcaagacctgcgataaatgttttctcgtcggcgccgtcctcaacagcgtcatcaatcagttccgaataataatccaaagtcttatttacctcttcataaggcaacccctttaaagcatgacgcaaatcatttaaaaactcatccttattcatcatttttaaccgcctcctttataaaatcatacgctctcgtcacatttggccattcatatataaatacattaatacgctcaatcccctctttagttatttggtaatactttctcagtcttccgttatgctcaaccgaataatgagtaagacatcccgaactttcaaggcgcttaagtattggatacaaagtagattcagaaatctccatatatggctgtatatcctttataattttgtatccatatgaatcttcacctttgacagacgctaacacacaaatctctaatattccgcgctttaattgtacatccacatgaaatacctcctttcgtctaatactatatcacgcatagtataatttgtcaagaggtattttaaaattattaaataaaaaaccagatctgaaaaatgtaaaaatactataataagaaataaacgcctgaaatcggttgaataataccgaaattcaagcgtttatattaataactaattttcttatatctttatctatataaatcctcttgccgcagtttttttatgacagataaacagtttcatttttaaaagcaccaaataatgataacgcaatcaagcttgtatccactaaatcttttccatagctcagaacatctcgaagaggaacaactccatctttgtcctcacctatatcagttttgagaattaaactaaataccgaaccgccttcctttatatttgataccaatattttaccgttcatactgctggcaagtttttgacacactattaagccataacctttataagatcttagcaatccgttattcttaccgaaaatacttatattgtcacggtttaaaaatgatttgattttctctatatcaactccaataccataatccactacagaaacagcaacggtattttcatttgagaaattatttacgataatatccacccgaccgttttctgagtgactgtgaactattgaatttaccagcaaattaacaagtatatgtgtaagccgcgttatatcaacgcttactagcacctcgctcctcatattatttctaagatgaatattcttgctcacagttacaggcagattattatgaacggtgtttataaactcattcatatatttaccaggctgaccttagtttttttataaagagcagcctcatttttactcatcagcagctcgcataggtttctcagcctgagataagtagttcccattgatgcattgaccttgtgtagaatatccaggctttcaggtttcagttcttcatattttataacagaatttatcatatccctaatcatatatgtattatcttctatcagtttaataatgtattcaatatcattttcaaacacactctttctcgaatcgcatgataaaatgtatttcttattatgaaaattttttagtaaaaataatcgtaaatcttttgcgcttaaactaccgttttgggataaagacagttcatttatttcattaatcataatacacctcatgtcttattttataacttaatatatataaaattttgcccaacaacatatttatttcatattaatactataaaattaaaatatctatgcaataatattattataacacacgaatagactggaagacaatgataaatatcacatttgaaaaaataaaataaaaaactataattaaactttaaaagtatttcggctgttttaaaatattatatgtttatatacagaccatataatataataaaacatatgtattaaaatcctgcacatatatcactttgataaagaaaccgaatatatttaaatatttaaattaatataaacaataacatacagctgtattctttgatgttttaatctgctcggtattatactgcccgcaattatatataaaaaattgataattgcctgtgattaaacaaacaattatcaaatagtaaatcattataaattgacttttatataaacatccacgccgcaattaaaacagcgcatcctataaacagcagcttctttgagtgatttctccattccccggttttcagcccccaggcagtagaaattattaatgctaaagcattaaacagaatccatccaacagagctgtatttttctcccaaaattattatagaaagcccatataataacaatgctgcataccatatcatactcacaataaacaattttgccgacctaacggcggagccttttagtttaaaggtataccattcctttcttataaataattcacagatacaccaaatcatccccataatacatccgccgacaagcacaggcagccatttcaccgctgaaatagctaactgggaataatctaaagccattaactcatatcccaaaacctcagatccgttaaaccctatattcatcgctccggaacctaagccggaaagaatggaaagcaggtatcctaaggcagaaccttttgcccctccgtcacgccttacacctgcaacagtaataataattactccgataacagtcaaaataaggccgatatatagtttaaccgcctcaccctcaacaggcagtgcagaatttaatatcatcggcataacagacccaacgattgttgaaatccccatagatattccatataccatagacattccgattttatcaatagctttagaaaatccaacagctgaaattccccacagcataccgcaaaatacaggcagtattttataatattttataaactccggcaaagacggcacctgaatccatgcaactcctattaccgtcaccatacacagcagacaatatatcccccaaaatgccgcccaagaaaacggtttataatttttataccccaaaccaaagcttccctgaaaaattccggcagcaaacaataaagcaaaaccaactaccatatttacccccatatgtaattatataaaattatacacattgtctatattatgatataataattataaagtcaagacttatttccggtataataatttttaatggatataatgattaaaacaaatgccggtttaaataaaaaacgcccttgaaaccggtgaatcggtttcaaggcgcttttagtatttttacaaattagtggggctgtttctttttttcataaaaatgttcatactggtttctgtctcgccataatcaacattatatccgaacgtctcacagacaaaacgaaggggaactaatactctgttgttaagttcaacggccggaacatcaagttcaacttcatcaatatcaattaaggcatttttgtctccgacaatcaattttattgttttgccattatactctaatatcacgctttgctcggtctcatcataaataattttattatctctaatccctatggcattcgctaaaaagcgcagaggcaccattgttctgttctcaataattattggttcaacatcaaaatttatcttgcttctttctatatatacatttatatttttactagatgtaatcctatatgtctcaccattaatttttacagcatcaccgcttacgcttgcataagtcggataaacacaaaacaatgaaactatcaaaacaaataaacacaaaataaaacgtttgaatttaaaaatcatttatatcctccttaatactattgtttattaaattcatctaatatctgtaaaaacaatatattatttctcatttgcataaatatcctttaaaaccatttctgtctcttcatcataatgatcttctgaatcatctatagactcaagacctacgttacccgaatcactttggtttgatattatattaaccggttttatttttcttgtcatgctgtcatactcaaaaaccttccataatgttccgattcgatttgttggaatatcatatttagctgctaaatttcctgccgaatatacttcaacataagcgcctgaattagacattgccgtgcttgcttcatcatacttattagaataatcatgaacatagaagctatacgttccgctgtcattctgaatgtaaatcgtagtagtctcaggtccgtaactgcttgtatcatctaagtcaagatctgcaaatctgattccattataataatatgatttattactataatatgtatgaaatttatcttgaccatccaccgtcggacctacaagatgagaatccaaatcatatggatgttgtccccagcgaagaacaattctaagttctccctcacttatttcctcagagttttcaggaaccagcgaaccatctttcgggaaaaggtttcctgaagtaaccgttatattgattgtattggttacatatccctgcttactcaattttaatgtataatttcctaaatttaatgacataccatatctgcctgaatcatcactcacagcggttgaaacaatatttccggaagttttgttccaaccccggtatgcctcaatttttacaccgcttatactgctgccgtttacactatttgttattgtgccatttatattattgaaactgctttcatcaccatcgaccataagcaaagtttctacatacttagtctcatttgaaaccaccgtagtattgcagtcaaaaggtatataaccggccgcagaaacatttataacataatttcccccgggcaattcaaccgagtacttaccctcagaatctgttactagcgactcaacaaccgcgccgctgccatcttttaatacaaccttagcatccgatacaaacgctgtgcggtcttctgcatcagcaacatatcctgtcagtattccgggatcggatgaaaatttaaatgggcattctcctaaaccaaacttaatctctcccgaatcatttatcaacgaaatataaaaatcagcaagatgatctctatattctgccaaagtcagatttaacggtgtaccgcttaacatttcagttattttataagtcagctttaaagaaatattaataaacttatcagcctttccatcaacacaaagcttgcatgtatgtatctttccatttgttaattcacctagtggtgtcgtcgcagttgcttttaactctactcctgcatgggcttcaatagatagttttaatacatctttcaaaaattcaacgctgaacgcaattttaggtcctaatgcaacacgtgcgctgccctccattttcacatttaaatcgtattcctttttacttataggatgatatccatcggtagtgctaaaagtaaatccagtttcatatgatacctttgccgtagcaattccaccggcttttacttcccaatcaaacggaattgttaactttacagatgcacttaatccggttattccaaaaggaaatgtaatatctccaagcgttgcccaatcatatacagtatcattttcttcattatcttcatattttaattgtaaagaagcctgtgcagtcatatcggcttttaccgttgctttgcaataaaagtaattttctgaaaacaaatgaacatcatagttcatctttattgaaactgttatttttcccttaactgaaccgtctaatttgatgtgttctgaaccatatgaaagattaaagcctatacttttgcttaattcatcgtcaacgtctatgatatcagctgcaacttcggcttcactggaatcctccattaacgtaatgccgtcgcttgcctcgctcatatcaatatccgaactatctgcattaacatccatatcaacctttatatagtcgcagtagtcagataaagtataatcatcatctgattcaataattatactatctcctttattgcttacatctttaactgtaacaaaataaccaattccatagtcaataagtactttatcaccgtctttaagattacgtgtaatattatcagtgttatttaatacaaaaatcccgttttcaacattagttttactttcgtcaattgtatttgatgtttcgctgtcaattactttaacttcatcatttaaaacagcaaagttcatatcgtcatcttcatcaaagtttaaaacagttttaccatcaaagtcatttatatcctttgctaaaaattcttcataagcctgcgtatatgtaatacaaacaaaagaattgcataaatattgaccgctgttgtctattaagtcggctgcaacaacaaaatattgcggtagacttgattgcatcgttatgttaacagatacttcagacacctctgttccttcctgaacagcggcatacccatttcccaatatacttttcttatcttccgttaatacttttaaagcaatattacaatcttcctgagccgatacttcaacatttgcaattaaattatttttatcaacagtgatatctgtaattgaatagtaaccatctttaccccaaccagcataaagagtcaaatttgaattaacgggttctagagaaaaatcaaacttgtcagtacaattggcatccttaaaccagcctataaatgaaaatccatccctttttggggtatcaggttccgacacatattcgcctttcttcactttctgagagtgcggcgtccccatagaggcttcataattcaagttaaaaataactttaaaatagttgtccttaatatttgaagagcctccgccagaacttcctcccgaacctccgccattaactttgcctccgctcgaatttgacggaccattattgggattaataacaactatatcgtttgaatttttattattttttgaaaatgaatcaattcggtctaaaatctgtatagtttctgctctagagattggattcaatggtttaaacgtaccatcttcatatccagttataataccgttgtttgacatggcagatatataaggtctcgcccagctgcttatgctgtatgagtcaaggaattgatcatttagctccgttaaattcaagtcataagcgcgtcccattacaactgacgcttcttcacgagtgataaaattattaggagcaaaagaaccgtcttcatacccattaataattcccgcagccgaagccatacaaattactggataaaaccaatcattttcattcacatcagtatatttattatattccaaatcgacatattgcttagctgtcacaacaactttcacgaactcagctcttgttatatagtcatcaggtctaaattctccatttccatcacctgatataattccactatccgaccacttgtttataatactttcagcccaatgaccttgactgtcagtatacgcatatccaactgaaatattcattccagcaaatacggaaaataagattgaaaaacataacactaaactaaaaattcttttactgctttttaacataataacctccactttttagcacaatctatctaaataactgcatttctcattataaacagacaaattatacttatatttttaatttttattatattacttataaactataaataaaatgcaataataaactacaacctaaaatatataaatgatttaatgtttattataacgttatatctataataactatatattatcactataaatataatatgtcaagtctatagttataattttttaattcttttgctgttacaatatgtttagcagaaaggatgtgtcataatgaaggttggagaaagaattactgaattaagaaatttacggggtattacagttaataagcttgccaatttagccggagtatcacaaagtcatctacgtgatattgagcttggaataaaaaatcctacaattgaaaccttatcatatatttgtgacggattaagaatatcaatctcgggattttttgatatagaaaaaaatgacatcagtccatttttaatgtcatcaattaaacttttaaatgaggaacaacaaaaacttctttctgattttttagaaagtattttaaaataaatagattaaacaggcggataaaatataataattaaatgtacttgaataatagactacaatactagtctatatttcaagtgctttttaatttaaaatacatagattaatttatattaataacacataataaagttaatcaatataaataataaagtaaaatgaaagtgtgtttgcgaacatcggtagggcgcatccatgcgccgcgttaggtaagctatcatctgaacacgcagtgttcaatatataaatatcacaacttatatcatataaatgttatactaatatttcgtatatattatacttcatacaaatacctattttaagaccatttataaatataaaattaattccgccacgatacatcacagtcgtgtaatatattatatgataactgagttaattattagcatatatattatataatattaaacaaaagtgtagcaacaattgatattgcaggtttgatataacaagctagtttcattatacgcacttttttaaatgcggtcacaatccatcacagcttagcaatttattggtatctcataacacacatcattcagatgtagtgactgcaatccaatatattatttattcggacataaaaaaagcacctgaactttcgttcaagtgctctgatatgttttggcagcgtcttatgttcccgggcagtcacccgccaagtattttcagcgctgagaagcttaacttctgtgttcggtatgggtacaggtgtgaccttctcgctattgccaccaaatatgactacactttttttaaaagtgtatgtaataaaactaaccagttttatcaaaccttaaatgtcaataaatcacttagttgtgatgtatttatgactactgtggctacacttttatttaaaagtgtatgttatacaaactaatatattatgtttttcaattgaaaagagaaagtaagaagttttcttactcacaacatagttcataaaactctcgccttatacttcctatgtcttttaggtcaagccctcgacctattagtatcggtcagcttaatgtgttaccacacttacacctccgacctatcaaccacatagtctacgtggggtcttacttcttttaaagaatgggaaatcttatcttaggggggacttcacgcttagatgccttcagcgtttattccttccgtacttagctacccagccgtgcctttggcaagacaactggtacaccagtggtacgtccatcccggtcctctcgtactaaggacagctcccttcaaatttcctgcgcccgcgacagatagggaccgaactgtctcgcgacgttctgaacccagctcgcgtaccgctttaatgggcgaacagcccaacccttggaaccgactccagctccaggatgcgatgagccgacatcgaggtgccaaacctccccgtcgatatggactcttgggggagatcagcctgttatccccagggtagcttttatccgttgagcgacggcaattccactctcttaccgccggatcactaactccaactttcgttactgctcgacctgttcgtctcgcagttaggcttgcttttgcgtttgcactcttcgtacgatttctgaccgtactgagctaacctttgaacgcctccgttactctttaggaggcgaccgccccagtcaaactgtccaccagacattgtcccccgaccggtttcacggccgcaggttagaattccagtatcacaagagtggtatcccaacattgactccacacaaactggcgtctgtgcttctctgtctcccacctatcctgtacatgcaataccaaaatccaatatcaagttacagtaaagctccatggggtctttccgtctagtcgcgggtaaccggcatcttcaccggtactacaatttcaccgggtgtgttgttgagacagtgcccaaatcgttacgccattcgtgcgggtcagaacttacctgacaaggaatttcgctaccttaggaccgttatagttacggccgccgtttaccggggcttcaattcagaccttcgcttgcgctaagtcctcctcttaaccttccggcaccgggcaggcgtcagcccctatacttcatctttcgatttagcagagacctgtgtttttgctaaacagtcgcttgggcctattctctgcggcctgcgctagcaggcaccccttttcccgaagttacggggtcaatttgccgagttccttaacaacacttctcccgctggtcttaggattctctcctcacccacctgtgtcggtttacggtacgggcacctcatcaatacacacagcttttctcgtcagtgtacaatcatccacttcgctacttaattttcgctccctttcgccgcactcgaccatcggtgcggttggattatgttcctgcgtccctgtgcttaacaatttcggtggctacggaatttctaccgtatgtgcatcgactacgcctttcggcctcgccttagctcccggcttaccttgagcggacgaaccttcctcaagaaaccttaggttttcgaccattatgattctcacataattctcgctactcattccggcattctctcttctatctcgtccacatgtccttccggtcatgcttctccctataatagaatgctcccctaccaacttgcataactattagatcacacattccttttttccttacttcaatttcccgtctgcttcgcagccggttttctttctctttctcatatgtgttctaatagttatgcaaattcccaagcttcggtataggttttagccccgttaaattttcggcgcctattcactcgactagtgagctattacgcactctttaaatgtatggctgcttctaagccaacgtcctagttgtctctgcaactagacatccttttccacttaaacctattttgggaccttagctgtgggtctgggctgtttccctttcgaccacgaaacttatctcccgtagtctgactcccggacatcatttttgcggcattctgagtttgatagggttcagtaagctatacgccccctagcccattcagtgctttacctccgctaaactaatccgaggctagccctaaagctatttcggggagaaccagctatatccgagttcgattggaatttctccgctacccacagctcatccccgcatttttcaacatacgtgggttcggtcctccaccagattttactctagcttcaacctgtccatgggtaggtcactcggtttcgggtcgtatacatgcaactctttcgccctattcagactcggtctccctgcggcttcgaaccttaagctcttaaccttgctacatacatacactcgccggaccgttctacaaaaagtacgccgtcacactttaacgtgctccgactgcttgtaagcacacggtttcaggttctctttcactcccctcccggggttcttttcacctttccctcacggtactgcttctctatcggtcattaggtagtatttaggcttggatagtggtctaccctgcttcccaccgggtttctcgtgtccggcagtactctggatcctgctcgctcttcgtcaatttcgtttacggggctcttaccctctttggcttgacttcccagtcaattctactatcaactccgaatgcgtttcgcagtcctcaaccccgacagtattactaccatcggtttggcctctttccctttcgctcgccgctactcagaaaatctcttttgatttctcttcctccgcctacttagatgtttcagttcagcgggtctccccacatatacctatttattcagtatatgctgacaaagtattgctttgccgggtttccccattcggaaatctgcggatctatagtcatttgcaccttcccgcagcttatcgcagcttgtcacgtccttcttcggctcctaatgccaaggcattctccatgtgctcttcttcgcttgacctcgtcgtcgttcccttcgcttatcgactttatgaattctcataaagtctcatcgcttcgggactcctcctctcaaattaaaagtaaacttttaatttgctttttaaagcccttctgctctttttgctctgttcacaactcttgtagtgaaatattactatttcacggtcgctatttagttctccttagcgattaatctttcgattaattttaatcatgtgagtaagttttgttaatactttcttagaatagtttttttacagctcctatctctagtcgctgcattcccagttacccttgtatgaatctcttcatacgcgcgttctttctgaaaaaacctgatcttgtatctattttcataaatactcatcatttttccacaatatatgacctgtatcatatattgcgtcaaagtatctttcataattatttctaatcattactccttactcttctctttattcaattttcaaacatcttctcaacctatcttctcagatggttgaaatttggaactataagttcctggtggagatgaggagaatcgaactcctgaccccctgcttgcaaggcaggtgctctcccagctgagctacacccccatgggatattaaatttaaaaccactttgtagcgataaaagtggtgggctgaagtggactcgaaccaccgacctcacgcttatcaggcgtgtgctctaacctgctgagctatcagcccgcattgaaaccatccgtacttgctttattttcttattgaaaacctcagcttagattagaagtttcttatctcaacctatcctctcagatggttgaaaaacaaatagtgaaaaagtcttttgagattgagtttcctcaatcatcgaccttaggatttcttggctaacttccgttacttccttccgcttccttcttccataattttcaggctcaatgccttactctcttacttccgctctccgcttccgttactcttctcagaaccaaggggtctccttagaaaggaggtgatccagccgcaccttccgatacggctaccttgttacgacttcaccctaattatcaatcccaccttcgactgcgctctccctaaggttaagctacaggcttcgggtgttatcgactctcatggtgtgacgggcggtgtgtacaaggcccgggaacgtattcaccgcagcatgctgatctgcgattactagcaattccgacttcatataggcgagtttcagcctacaatctgaactgagactgctttttgtgttttgctccacatcactgctttgcttcactctgtttacagccattgtagtacgtgtgtagcccaggacataaggggcatgatgatttgacgtcgtccccaccttcctccgatttgtcaccggcagtcctgccagagtccccaacttaatgatggtaactgacagtaagggttgcgctcgttgcgggacttaacccaacatctcacgacacgagctgacgacaaccatgcaccacctgtctccacgtcccgtaggacttcacctatctctaggctatgcgtgggatgtcaagtcctggtaaggttcttcgcgttgcttcgaattaaaccacatactccactgcttgtgcgggcccccgtcaattcctttgagtttcaatcttgcgaccgtactccccaggtgggatacttattgtgttaactgcggcacagaaggggtcgatacctcctacacctagtatccatcgtttacggcgtggactaccagggtatctaatcctgtttgctccccacgctttcgcgcctcagcgtcagttatcgtccagaaagccgccttcgccactggtgttcctcctaatatctacgcatttcaccgctacactaggaattccgctttcctctccgacactcaagatatacagtttcaaatgcagccccggagttgagccccggtatttcacatctgacttgtctacccgcctacacgccctttacacccagtaaatccggacaacgcttgccacctacgtattaccgcggctgctggcacgtagttagccgtggcttattctgtgtgtaccgtcattatcttccacacttaaagaagtttacaacccgaaggccttcttccttcacgcggcgttgctgcgtcagggtttcccccattgcgcaatatcccccactgctgcctcccgtaggagtctgggccgtgtctcagtcccaatgtggccgatcaacctctcagttcggctaccgatcgtcgccttggtaggcttttaccccaccaactagctaatcggacgcgagtccatctttaggcgataaatctttgattatcataccatgcgatacaataattttatgcggtattagcatccctttcggaatgttgtccccctcctaaaggcaggttactcacgcgttactcacccgtccgccgctttccatccttatcttctccccgaaggaatccgttaaaaatttctcgctcgacttgcatgtgttaggcacgccgccagcgttcgtcctgagccaggatcaaactctcgattattattgttatatatccaggctttcgccttccaatatactcgattgtttgttagctcttttcaatcactaacgtttgcagatctctctgcttgtaaagttcgctaaaacttttttggaattgacaaagtctccactcttgcgagtttcttaccttgtgcaattgtcgtaataagtacatctaaatgtatctttattaccgctttttcactatttatttttcaaacatctgctttctgtttctctcgaaacagcttgactataataacacatttaaattatcttgtcaagacttttttttaactttttttgaaaaaatttttaaaacttaaaaattgcttcttcatcaagttatgtatgtttgttcttcaaaacatataggtcttttcgaacaacttgtttagtatagcagagacaaattattttgtcaagacttttttcttcttttttttatttattttttaaattagctgatttttcccgtttttacgttgtttattgtcctacttccgcttcccgcattatattatttattagtatatttctaaaatacttataataacttacgttatatttaatactatatctttacagttttccattctcattccgttaggtatttttcataattcaaactatgtataaataataaaaacaaaagatcagaatgccttcaagcattatttatgctatgattgataaatcaaatttattactcactctattacactattgctcttttaattcagtatcactttttttaagaaaagtacaaaactgttttaagtaatactgaaagtactttctacttaaaaagcgataaataaaagaggggataattaccccctcttattaatatgctattgttttaattttggaactaaaatctcatctctttctatttttttactttatcttcaacaatacttccggttagcttgtcattttcttctaatactgcatagctgtctgattgactttcattttctgtttgtgttccttctccttcatatagtactttatcctcagcaacacttccagttaacttatcattctctcccaaaattgcatagatatctgctttttcaccattcaaaacattatcctttccttcagaaattgataaaactctgtcttgaactatttgaccgagtaactcaccatgatttagtgtttccatacggttatccgctccggcggcaaaagctgatcccgctgcggctgtcactgccaatcctaaaactactgatagtacttgtttcttcataagtaattcctccattttttcggctttgccgtatttttatctcaggcttctgcctgatgacaaagtaagtataatttaatttatcacgaaaagtcaccgaaaaattgtggcagttttgcggcaattgattttgcttactttaaaatttagtattttatgatataatacgaatataggcggtgaatcaaatgaaattaatatatgcggcggatgatgaaaaaaatattcgcggactgctaaagtcttttctggaaaatgaaggttacgcggtagaagtttttgagacaggcgatttattattcgaaaaattccttaaagcacctgccgatttagtaatattggatataatgatgccaggtaacgacggctttgcaatttgcagtaaaatccgacagctttctaatgttcctattattatgctgacagctcgtgacagtgattccgattatgtatccggcctggcactcggaagtgatgattactttaccaagcctttccgtccgttaaaacttgttatgcgggttaaagctatttttcggcggatagatatggaacagcaagcgctaaaagatgataaaatcactttaggcaacctatctttactttcaaaacaaagatcggttttgatatcagaaaatgaaataccgctgacattaattgagtttgaatttttagactttctgtttcaaaatcaacaccgggcagtttcgagagatgaaatactgaatcaagtttggggatacgacagcatggtagagacgcgcgtgactgacgacactgtaaaaagactgagaaaaaagttatccgattacggcagtaatgtttttattgaaacagttcgcggtttcggattcaaactgaaggtgaatcaactatgaaaattagtatacgcacaaaaatattttcaatttttcttataactgttgttctcagttttattttaatgtttctttctttcaatataattacatcatatcatataaaaagagaatctatagattctttaaataaagcttctgctacagcggatagaatttctcaaaacttttctcctaattttgaatcctactcagctatttattctgaagacatagacgggacatattctgaaaattatgctgacaatcaaaattttttatattctgaaagcaaagaaaattttgataccgaaaaaccaactaaaatacctgaaaacactaatacacagccatccggcttcactgacggcgctaatatgcctaaggccgaaattgacgccgcctcaatcgcattaaacttacactatagtttattagatgaaaataataaaacaatcagctttttcctaactgattcaaaaaatggagaccttatttatccgcctcccgagatgtataattataaagaaaaacaaacagctttcttttacgacaaaaatgagttagataaacttagattatattttttggataaaaattcgtccgaacctgaacataccaaattagacggaacagattatttcacacttaaaaaaccatattcacaggatattaatatcatattttataaaaacaatcagcagcttaaggatttaattcgtatcattaattttgtcctgctcggtctgctctttttaaccggcactgtaatggctgcagtagtaataagacttacaaatggattggtactttcgatagataaactttgcagtttttctaatgatattggaaacggaatatttaaacctaaaatgctgaacttaaaagaaactgaactttcaggtcttgagactaatatgaatcatatggcaaaaaagctctcagagtacgacgcggagcaaaaaacattttttcaaaacgtatcgcatgaactaaaaactccgcttatgtcaattcaaggttatgccgaagggatatcagctaaactttttaaaagccaaaaagttattgaagccgctgatattatattagaagaaagcgacagactttcagatatggtagacaatattctatgtttatctcatcttgacagcaaagatcgatttgaaaacaaaacagactttgaatgtactgaagtaatcgaaaacttactgcgccagctaaaaccggtatgcggtgaaataaagctaaattttcacacagataataaaaaatttataattaccgggaatcctgagatgtttggaaaagctgtaatgagtattctgacaaacgccataagatatgcagacaaatcaataaatatcagctgcagtgcgcgtatccggacaataaaaatttctgacgatggccccggaattgcagaaaaagatatgccatacatttttcagcgtttttataaaggtttaggaggacaaagcggtataggacttgctattgccgaaaccgcaataaaatcaatgaatggaactttatcagccaaaaataaaaacggcgctgtatttaccataaaattttatgaaactgacaatagttaatatattttatattaacttgcaacaggacagcattattagttatggtctttatttttaaagatctttttacattttcgctttgtcataatgaaaataataaaacaaaaatggaaccgaaaaatctacacaggttccattttttgataagaaacgttttatataattcaaatgatttttaaatttgtcccatcttatttaacacctttgtctttttcagcgcaaaaagaattacggcggctatcacagttcctcctgctgagctgacaaagaacgggagtatgtacgtccacagcaccgcctcttttcccataagcagagccgcaattggatatgcgaagattcctcccagaactgatgtaccgaacagctctcctatacacgttaaaggtatgtttttggaatatttatataccagtccgcaaagcagcgctccgcacatgcttccgggaaacgccagcaaagtgcctgtccccattaagacccttgtcagagatgtgacaaacgccattcccactccgtagaacggtcccaataaaaccgccgccaaaatattcaccaaatgctgaaccgggaaacatcttgaagctccaaccggtatgctgagaggcgaacaaaccacgcatactgctatcaatactcctgctaccgccatcttccacgctattgtctttttcatacaaaacctcctgattttaattttagacacaaaaagggaagcacctcaggtggtgctcccctatatctgtatcagatgaaagaattttatcataaactcacgattatgtcaatagattttttcacttaacaattttagtttcataaataggctgtttatagccgcatttcttacaaagaatatttaaactctttctgtctgaattcacagttaatcttccgctccgcttcattttttcggctcttattttgtttgctttcaaatctttttatatattctcactgctgaacacagctgcaataattctagatatatcagtacctgctgcatttccggatatataacttttccttttcattatattcagacggcaataccattccgccgtttatgcagacaataataccgtttacagcaaacactctgcctgcgttataaaaattctataacagttttattatatcaaacagtacagtctgataaatggaccgttattatcttctgcaataacagacaatcaaattgtttgtttcctccgttactttaacagcagaatcttcaaaattttctattttctctgtcttccttaatccgattcgtaatctatttgaattaatccaatactcaaattttttatttcaatacattttacaaaaattatggtcggactaaataagtaattgtatattaacttaattgttttatgccaaaacaaatgctataatataacaatataaaattttattagaaagagaaatcaaacatgaaaaacaaacttacatcaacctacactatttgtttcggagctatgctcagctgtctcctatggggaagcgccgctccatgtataaaaatcggctattcgctttttgaaataagcggaactgcgtcccagctgctgtttgccggaatcagatttattatcgccggaattttaacaattttattcggcagtatattgagccgcaaaattttaataccgcaaaagtcgtcaattcccgatgtttttaagctcgccatggttcagaccgtgctccaatacatattctactatatcgggctggctaacacaagcggcgtaaacgcttctattataaacgcctcaaacgtttttgtttcactgcttttctcatgccttctatttagattcgaaaagctcacaacgcgaaaaatattcgggtctgttatcggattcctcggggtaatacttatcaatataagcggcgcggcaataaacggaaacttcagttttgccggcgagggggctatttttatgtcctgcttatcctacgggctttcatcctgcttgataaagcggtattcacagcgtgagaatcctgtgaccctaagcgggtatcagttcttcacagggggaatagtccttaccattatcggatttttgtgtggtggacggattactcatgtttcaacccaagctgttatgcttttgatttatttggctcttgtttcctcgatagcatacactttgtggggaatactgctgaaatacaatcctgtcggaaaagtggcggtttttggtttcatgaacccaatttttggcgttatactctcagcatggcttttgggcgaacaaaatcaagcattcagcataatcggagttgtttcgcttctgctgacctgtataggaatttatattgttaattcaaattcaaagattaaaaatttatcatagacttcaacagctcatataaattttaaacgctgggatagcaacatgaataaatactgtcgttttagcactaagcagattttgttaatcacacagattgaaaataataatgcagtattacttgtcaagatataaataagtcagtatttacacaagtattctgcaataaattttatttttatgaattaaactatttatcctcatttttggagattataattatttgtataaattaaagcggaagccatgcggcttccgctttaaatatgttatttataaaattatatgataagtatctataatataataattaattttatttatttaatccttatcaacatctaacatgcaaaatacactattagtataaaatccgtcatattattttcttatacataaaatacgtaaaacaagtttattgatatataaaactaaatcaaaaagctttaccgggactgcgcgccttacgcggcaaactgcgtttgtgttgcgtattcatattattatttgcgtattcatattattgaccttgtaggtaaatcaaaacaagttataatgaatcacacccaccatgctggtggggtcacagacattgtaggtttatcaatacaagttattttgtatcacacccaccatgctagtggggtcacagacattgtaggtttatcaatacaagttattttgtatcacacccaccatgctgaggggccacagacattgtaggtttatcaatacaagttattttgtatcacacccaccatgctgaggggccacagacattgtaggtttatcaatacaagttattttgtatcacacccaccatgctgaggggccacagacattgtaggtttatcaatgcaaagtgatttgtattacacacacttttttaagtgtggtcacagccctccgatgcttgccataccacattttttatatatgaactttgatatttccgtctgctttattgcggactttccgcattatagttggaaagctaataaaaaccaaaaatgttcactataaacactgttattttttctgtttactttccaatactctattttaataaatctgaaagctgcttgtcagtctcttgcagtaaactctgtatctgtcctgtaatataagttatattttcattaatagatctcgtgccatccactcttatcacaggacactctaatgattgcacccattcctcaacatatctccctgttcgggaacttactttatcgtaaaatgttttttcctgctcgtacatatctcctcctggtaaaattctactaccgaatttctgcaaagagcgctgttttattctttccaaacgaacctctttcggaacatcaatcaaaactgcataattataaaacggcagaacatcttttccatactctccttttacagctgaaaacacaaagtttttatatgttacgacttcattcaaaaggatcttttctacctctttatcagaacgtgataaaccactgctataattggaagctttctgttgaaaaaatagattttcaatatcaataaaatgaatttcaagtttctccgcaagcgcttttcctaacgtactctttccgcttccattcaaaccgcacacaataattcctattcccatatatatcatctttccatttttattaataaaaatataaccgcgaataagacagcgctcaacaaacaataactttaatatatattttaagttggctcacaattaaataattttttgcatttatctatcttatatttaattatattgaaaatccaccttataaggttttataagttcttttgccaaaggctataaacccttatggaatcgacatttttgcttatcaattaagtttccatcgcataatcttataaaatcaagcagaaaattggcggaagttttcttattttgtccacactaatacaatcaatagaatccatacttatcggcttttaagccttgacatacttatttaaacctgacaattaaaacttataccgccgctgtttatgtccaagttgaaatatcatactcaattgcttttggttttaaagtaattatcaacaccgacagcaatcgccctgcctatagtttccgaatcgtttgtcagcacttctaagtcggatgcattatcaaaaaatccaatttccaaataggctatcggtacgggacttttgcagaacaaaaccgcggttgggaaaccttcatatctcccgtctacaaaagcggacagctgtgtgtctgaaacaatttgattatttataagctgacccaaaatattgctctctgatatatattccgccggcgcaagaacaccgctttgatcatacactcccgacaaagccatatacgcgctgccctgacctccgccggcgttagaatggatacacacaaagacgtccgcgtccggctcagtagaagtgtcgccgcccgaataacaatacgtaagccgttttgtcattgacgggttttcatcgtttgaatttcttgtgagccttacctcataacccatttcctcaagatattttttggcgtttagggtattgtttaaatttatttccggctcaatatccctgtctccattttcaattggataccagcagcttcctccgtcagggtgccggccgctgcatccgcttccgcggcaatcatcccaaacagttcctgacttccaatggcgccattctccccagccgcctttttctgtgcttaaaacccagccgtcagcagatttgtcttcttcgctcatattaccggaatccttcccatgacccgggtcaagaacaacaatctgctttttaggcgtttgggttggcaatgcgctcgcctctgcggttggaacacttatttcatttttttcggcttcaaatgtctgtctggtaatcgttccgttcagaacaagaccaaaaactattatcaatcctgcgagaataataccgagcgctataactaagcctattaaatattttctcataatcaatcaaaggtaagatatatctgttttgaatatccaaccgtgcctccataagatattttatagaacgtattgttcggagtgtccaggtacgtaaccttagaacccacaggtatctccataattatgttagcgtctgacgcctcagacggcgtgcttcttaagtatatagcatatttcacattggttaccgtcatggtatcagaccatgctcttcctccactgtacccggcattgggactgacgctcgacagatattcacgcttggaatatccaatccgcccgttatagttaatcttggcaaaaactgaatccgcattttcaataaatccaacctgagttcccaacggtatttcagttatgatattgctgtcgttctcctcaggcaagcttcttaaatatatagagtattttacgtttgccacatacatgtatgacaccacagtggtgtttgaacttacgttatatgacggtacattctgaaccggaggtgctgcgggcgcctgagcagccggagccgctgtagccggacttattgtcggagcttcagtagcgacaacggaagccgcctgatttgccgcctgtctgccgggtgataaaacccctgtaaatataagacacataaccgcaatacttatcaaaattacacctgataaaatagaaattgccacaataagacccgtattgcttttcttcggaggaccgccgtatccattgttattatatcccccatattgattgtatccgttaaactgattcggaggtgtataccttccgtctcccgatcccggaacgcttccgccaatattggcattgccgccaaccctttcctgtccgccgtgatagtttggcggattttgatttacagggccggtgttaaaaccgttgccgccgccggacggcctattatcttgatcgtttacatttctcataagaatacccccaattaattttttcatacgacgccatatcctatttttcgcacagaacaataatgtttcacgaaaaacattgtgcgctgtttcataattaaattataaatatcttacatcagaaagtcaacacaaatttgttttattatagtatataatccataaatatacataattatttgtttatgcaattctatgtaataaaaacctatgaatacttttaagttaaagctgatgttttattttactcattacactttaatgtgattcagctttttgttcagaattttattcgtttttcacagcatatcgagccttattatttgacaataaccgtgaatacaggcttttcgagttcctattaatttcatcttataaaaactattcttttggcaaacatcggtaggtgtgatacaaaacaaactgttttaccaaatccataatgtatgtgaccgcacctaaaaggtgcgtatgagccttaaatacttgttttgatttaccttcaaggtctgtgaccccaccagtatggtgggtgtgatacaaaataacttgttttgatttacctacaaggtctgtgaccccaccagcatggtgggtgtgtgatacaaaataacttgttttcatttacctacaaggtcaataatttgaatacgcaaatgatatatgaatactcaaccaatcacatgaatacgcaaacgcatttatgcgcctagtgaggtgaacagccacagaattgttaatatcttttatttttataactttatataagattaattacctattctatatcctcatcattaagttttttattctactattttatgtatttgttctgtgcacttcatattttaaaagaaaatataaagtaaaataattatataatttataaatagttttgttttgtatagtttagtttagtattgtttggttttgtttatataatggtctactgccttagttactatcttgattactatcttgattactatcttacctactatattaactattttgattaaactttatattcattctataatctctctagtgtttcttcataacattatctatgcgacagcagcatagaccaatctcatatttatctccaaataggaaataagccggtttctgttacaactatattatcatattaaatgacataacgcgtcatatgttttttaataattaattttaattttttagcataaaaatattcgataattatcaatgagatataaacaaaaaacttaatctaatcaagaacattcaatgttaaaaataccgcacataatataccggatatagacaagtccttatttatgtgcatttcttatttatatttttattgtctgtcaattaatactgcagaattgttctaaatatgttactaaaaaaattatacacagtttacctcttcataatagaaatctcatacatttatatcaactcgtggcaaaaacatttcaaattatcttccaatactaaaataaatacgctaaaaattttttcactctataataaaaatatcaaaagttcaattcaaaatatacttacttcccctgtaagtgcttaacaaaaaataccgcacgtaattgtgcggtatttaaaaactcattcattgcatattatagtctgaaataaacttttacgtttaagatatattaatcagaactttttgaagaacttgttcccttgtcactgtttgaactgtttgacttcttatcattatttgaacttccggaactcttttcgctgtccgagctaccggaactcttctcactgcttgagctgctgtttgtcagcttcttaacagtgctgtcccaaaaatcggtgtaaacctctccgggttttagtccgccaatcttcgcttcgcccatctcagatactgttaccagctggtatcctgcgtcctgcagtgccggtataagtctgatagcagcttcaacagaaggctcataaatatcatggaacaaaattatatctccgtctttcacctgatccataacatttctaaatgaagtgtcggcgtttttggtcttccagtccaaagtatcaatagaccacaatattataggctggtctaaactctgacaaactgatttgacattatcattatatgagccgtacggcggacgaagaacagttgcgccttgacctgcaatgtcgttaatattgtcgtttgtatcctgaacctgcttctttaaagcgtcagttccaagtttagtaagctgtgtatggtcataggtatgacttcccagctcacagccgatatccttcattttatttattgtatcgcttccgcccttgacgtttttaaccaggttgcccagcatgaaaaacgttgctctcgcgttattttcttcaagagctttcagaagttttgtagtggtagccggattcggtccgtcatcaaatgtcagacacaccattggcttatcagggtcaacttttccgttgccgcgcttccagccgttatcaatgtatgtctgcacttcacttttcaaaacgtccttttcttcctctgtagccggattaaaaacctttgaaaagatagaatcatgatttgtagtatatccatctttttcgtacttagacacatcagctttaaacactactatactgcttccgtcatctttccacatggtggttattacgtcattaaaattatcataccagccaacgctcttctgagcttcagcctcagacgggtcaaactgttcgctcctgccgtcttccgcatacattgtcaccttagtatcgtcagccttttggtcgacatcaaccggcacaactcctctcataccgagacaaatcaccaggattgccgccagcaaaacacaccccaaaacctttttcattagtataaaacctccaaaataatactgaaactatattttcacttatattatttaataaattcctaaaaacacaacacgcctatttaactattttaattatattattaaacgaatttattgtcaacggcgttatataacaatttaattactttttattatcctattttgataatagtcactattttttatgccataaatatgtataccaaagctataagcagcgccaggtcatcgttttcgtcactgtctgcaatcattagtatgagagcggcaagcagaagatcctccgctgttaatatgccaagaattttttttgtttcggtattatatattcccgggggaataaaacttaaaattgattttactatgttcggctcttctcttcttccgcctgactttcctccgccgaaaagaccgctcaaaagtcctcccagtccgccggccggcgggtttggcgctccccgaggctcattcctatggttatagtccgccgcccgattccagttcatatcatccctatgtccgtcatactcaaagttatcgttcgaattatgccgaggtgtgtcataattctgatttgccctctgattttgtcgattcccggaccctgcattggaatgaccgcttcccatattccggcggctgctctgagaataatttcttcctgtatcctgatgaccgctttgggaatggtttcttcccatgtcctgatgaccgccctgaaaatggttccctcccatgtcctgataactgctctgaaaatggttatcacccatatcattatagctgttctgaaaacggtctccgcccatatcctgatgactgctccggggatggttctgaggtctcggattacccgccggtttgcttcctggcggggattgataacgtttgtacatagctccgcctcctaaaagttcagattaaggtcgctgtctttgagcagagcaaaggcctttaccatacccattatctttaccgcgctgtccgtcttttcctgtcttgattcacgcaggtacggctttaaagcgtaaagcagagccgcatttttgctgttgcctgtggtcttcatcgcagacataacatttccgagttttatcatcatatccatctgatccatatcaggaaacgggctgtcttgttcctgactgttcgcattatcttcatcagaacccacaaaggcgttgattatattattaagctttgactgtccgtcgtccgttcccatcatctcttgaattttttctatagccgaaccaaagtcaaaatccatattctgctcttcattcatataatcgccacctttcagagtaagttttgaatatacttaaaactacttcccgttctttgaaaatatagcgttcaacttcttcatcacgtcaggattggagcctattgccctttgaagccccggattgcttgagagaaccttattaatctctttcgggtctatcttgctgagctgttgtttcagctgctcctgatttgtgttttttatagtgtttaccacctggttcatctggtctttcgacattacgtttccgaactgcttaagagtattattgagattattctgattaacaccctttgttaaatcatttatgtccatattagatacaactcctttcacattacattgtatgtatttttataaaaatagtgacaaaaaaatatttatgtgctataatattttattattactgaaacggaggcttattaatgaaagctttagtgttaagcgattctcacggcagttttcaaagcataatgaatgctgttgaaagtgaaaaagatatttcattaataatttttgccggagatattcagcgtgacgcggacgacattgccgccgcataccctgatattccatttgagtatgttctcggcaacaacgattggtacgttaacgacgttccttatgacagactgtttgagttttccggcaaacgtatttttctgacccacggtcaccgctataatgtaaaaagcggaatgtatacattaagacagaaagctcacgacgttaaagccgacatatgtattttcggacatacccacagcgctcttatcagagaaacggacgggattcttatgcttaatccgggctgtgccagatactcttatgcggttctcaatataaccgacagcggtgtaaacgctgaaatcaagaaactataaatattttattataatttattcttattaaaagataaaaagtattaaaaaattgaatcagataggaagataatatgctgcttacaattgacgttggcaacacaaacattgttgccgcactctatgaaaacgataatctgcgccgtcactggcgcatggccacagataaaaacaaagccagcgatgaatacggtatgcttataacacaatttctgttgaatgaaggggtaaaaccagatgagatagacgacgttatgatagcgtctgttgtccccactgttatgcactcgcttacaaacggtgttaaacgttatctggactgcacgcctatggttgtcggacccgggataaaaaccggaatgaatatcagaatggacaatccccgcgagctgggcgcagacagaatagtcaacgccgttgccgcaatacacaagtataaaccgccgcttgttatagttgactttggaaccgccaccacattctgcgcggtggacaggaacggaaactatgtaggcggcgttatagccgccggaataaaaatctcaatggacgcgctttttgaaaaaaccgctaagcttcctaaggtagagattataaaaccgtcttcggttatcggaagaaacacaatcgacgctatacagagcggcgctgtgtacggacaggcaggacaagctgacgggattatacgccgtataaaaaaagaaatcggagaggacgccactgttgttgcaacaggcggactcgccacaatgatatctaaagagtcagacgagattgacaaggttgacagtctgctcaccttggacggtcttaaaatattatatgataagaacaaggagagatgataaaatggattacaacaaagccgcaatcgaattgcacaaacgtttgaaagggaaaatagaagttaccgcccgcgccgaaactaataacaaagacgagctttccaccgcatatacgccgggagttgcggaaccgtgccgtgaaatcgcaaaggacataagaaaggtatacgactacacaagaaaaggcaatcttgtcgctgttgtaaccgacggaagcgccgttctcggactgggaaacataggccctgaggcgggtatgccggttatggaaggcaagtgcgtgctgtttaaaaactttgccggcgttgacgcttttccgatttgccttgataccaatgacgttgatgaaatagttgaaacagtaaaaaatattgctcctaccttcggcggaataaatttagaggatatttcagcgccgcgctgttttgaaattgaaagacggcttcaggaggagcttgatattccggtttttcatgacgaccagcacggcacagcaatagtagtgtcagccggaatcattaacgcgctcagagttgttaacaaaaaaattgaagacgctcagattgtcattaacggagccggaagcgccggaatagcaatctgcagaatgctgatgaatatgggtgctgaaaatattattttggttgataaaatcggcgctatatgcgagaacatgaacggactgaattcagagcaggaaaaaatgtctaaaataacaaaccgtgacggaaagacaggcagcttggctgatgttatgcaggacgcagacgtatttatcggagtgtccgcaccgaacattgtaacaaaagaaatggttgagtctatggcggacgacgcaattgtgttcgctatggcaaaccctacgccggagataatgcctgaccttgccaaagaggccggcgctcgcgttgttggcacaggccgttctgattttcctaatcagataaacaatgttatcgctttcccggggattttcagaggagccttagacgctatggcaagcagcataaccgaggagatgaagattgctgcctgcaaggctatcgccggacttatttctgacgaggaactaagcgaggactatataatccctaaagccttcgacccgcgcgtaagccctgcagttgctgaagctgttgccaaagcggcaaaataaatttaatacgtacacaaaaatatgtgctctatatattttacatttcaaatctatttggaaagcaaactaatatagagcacatattctatatcaaaataaactataataatgttttatttataattcagcaaactgtaagattacaatcatactaaaaagctgcctttataaatttcaaataattatttctcataaataaattatcaatataataaactcatgtcacataagtttatcatttataatatacttgccgtcaacgccgtcgcaggattatattcaataaatgatgttcctcataatacagttggtatacatagtttaagaaaataccggacgcatttatgtcggcaaacaactcagttttaactatatttgtaatctaataaatattcgggtgacaattatgaataaaatttctacaactaaaataataataattatttctttaattattattattttctcaggatgtacatcagcaaatcaaaaaaacgacataactacaagtgataatctaactgcagaagatattttaaacgtgaatacaatacaaaatcttacaccgcccggggagataactcaaatttctactgcgcagtattatattgagaatggagagactaaatctgcccagtcaattatctgcgctgaaaacaaagacggcgatatatggatatacggtgcggacccaaacagcggaacctggttcatattatccccggaatattactatacggttttggatcctgctgatgaaagcggaatccacttagggattcaggaaaaccaaactgatataacttatgatgagtatcaaaactatttatctgattacaacgatatacttgaattaaacggtataaaagacctggagatttcctcggtctcacaagatgacagtgaatatacggttatatttactgagcgcctaaataaatcagaccaatatgcttcatattataaaagaacatttaatatcaacgaagatgaaataacaattaaccgaacactgacgcttgataaagataatttaaaaattaaaaatattattgtcagctttaggacccaaaactgccctgaaaaaattgaatccagaactacagtcagttatccggatacgattcctgatattaacttaataaactaaaataaaatataccatagaccctgcagtaaaaacaactgcaaggctatgatatatgagtcaagattgtaaatatcattgtatttaatatgccacaatctgaaagacatattatgatttgcctgtgcttttacagacgaagattccacaactaaacaaactttgtaaaactaacgctttgagctcttcattgcgtctgctttacatctttcatactctacgttgagtacagtctgaactgtatgttcagctaatttgtcaagagcattatactttttaagtaatgtgactacgttatcattgatcacgagcgggatagagtaatcaaatacttgaatgtctaaagctttacaaattttcatcactgtactaaatcctgtgccggaaacaccgttcttcagagcgctgacaacagttgtctgtgcgattcctacactgaacgcaaattggcgtacactgcgaaattgttttttgatttcttgcttaatcagcagagttagttcatccattaaaacacctcctttatttcattctaacataattacatttatttgtcaactattggttataatttttatacatcgtttatattcctcctctataatgcccgaaataacgccgattccgcgctcatcaagcgacgaaatttttgatattatgggtatatccgcagctttaattccatatttttctatatcaaatatatcaactctaagccgcctgcatatatctaaaaccatagaaaacttactgtttgacaaaccgtttttaagaatacagtttaaagttgaatagggtacgttaaccgttctggaaaaccgcgccacactgccatacttttcatcaatcttcgtatttatcttatcgcatagtttaataacttcttcatcaagctgactgttgttaattaatattctgcaatcttcgacattttcgtataaatcttccataattatctcccactgaaaaatatttcctaaataagtgtatcaaaaagcatttcacttgtcaacaataataagtgaaaaaataggaataattttacttttatacgtataatcaacgatataacaaaaataagtaacaaatacacaacttaatgtaacattgatttgctaaatttaggtagtatattcttaattcagaaccaccaaaccacaatatatcatttatttgaattatatttagaattacagggatattaaaagccggctgcaaaattgcagccggcccattataatattttaagattcagttacatatacacgggtcttcataggtatattatctaccatccagtttatatattttgcctggcagcgcacacagccatgagaaatcttcgccccaacagtgttatcatatggagttccgtcatatttcaaaaacgttgaatgcagtgcataattgccgtagaataccataaccgggccaacataatacgaatcataaggccacatattcgtatagtcaatatattcaaacacgcccgttattgtttctcttccctcagctcctattccgacagtaaaatcttttacccatttccaattgcctttagaacctgagaatacggtgcatctaaacttttctttgtttacccagataagataatcggtcgagcttccaactccgctctcgtttattcttgcctcctggtcagctatagaacttacagccatgggggatttagtaagttttatatcaatataagaaccattgtcgtaatattcaagagtgcttccgaaggcctctataaacggtcttaattctatatatgtcaggctgttaatattggaaaccggaaggtctaggtttatatcgctgccaaacgctgtcagatacgaatatccaatattgacaagcatttcgttatcgccggtcttaacctttacgctattatattcagggaagtaagtacagtcggatatgcctattgccccggcaatctctgacagcggtgctattatatacgagccgtcaaatatagcaggcgaagacagagagacatattctccgtcagcgtatatattaataggacactgtgttctgacgtgtgcggtcatatgcgctgagctcaccggaaccctgtctccgttttcatccggctccgaccaatatgtatacagcggaatcttttcagtcagcggcaccggataattatccgaataataatctattgaatcaacgcctgttacctccaaataaaagacagttcccactttagaatccggtatattaaaatctattgaaaaactctccgtatcagtaatatactttgtgtgggaatcaaggatttttccatcttccgaacatatattaaatacagcataatcctttcgcggccatccgtcaagctggcagctgaaattaacttggtacgatgaaatcatcacatcgtttgccggctcctcagacggaacgtcagttgtctcaggatatggctccggactggaagattcaatattaatatcaggctccgccgtttgtattccgctgggataaagggtaggctgaacgtcttctgcgccttcctcattatcgtcaataatacccggggacgggctaaccaatatctcgctttcattatcccctaaataactctgggtttcctctgcgccgctgttaattcccccggaaatattttcatttgcccctgaagcaaatacccctgaggcagctgttgacagcataacaacagttaaagcggcagcaattgtttttttaattttcatttacttacctccataaaataaaatcttgctgaaagaaaacgtcttgattgctttgacaaatatttatttgtgacgaatattattgacgcataagaagtgatagattacaaaacacaaaataaatacaaatcaaaaaagaacaaatcaattttaattcttataaacttactaatattataccgtataactgaccaaaagtcaatcggtttagcaaatcataaaatcagaacattatacatattgggtcaaacttttatatattcacaagcaatatcacaataaataaaataagacgactttttatgttaataaaattatcagaagtttaaagatcaaatataatagaaatatgattttgcaagcttcggtaggtgtgactccacctgaaaaggtggatgttatacaaagtaacttgtttttgttagccttcaatgtcaataatttgaatactcaatgcagatgaaatctgccacgtaaggcgcgcggccgcggttaagtttatttctaaataagatataacaaattgttttaaatacgttcacgctttgcgtgagatgtatgctcacctaacgcggtgtgcttacgcacaatacatcacaactaagtgattcattgacattttaggctataataaaacaactcactttgtatcacacccacctagaaggtggggtcgcacccttccgatgttcgctaaaaacaccattttggggcaagtttctgttaactttccatttgtattactctgctgcttatatgttttatgaaaccggccttatcttctaaatcaaaaatgactccaacaaaagtaggagtcattttatatatgctgtaataaaatagtttataagccctattgaaacaaatcattatcgggcgattcgctcagttccttaaatactgacagtttgttgttttcatcaaccgttgctaaaaacaccttttttacgtctgatataccctgctttccaagctcatttttcagccatatgtcattattacctgtgtattttagattatcataaagaataatcccgtctaaaataacatttatacttgcccttgacggttttttaggattaactccctgcatgttcttatccatatcctccacattaacgggccgcgcgccggtggtcggaaggacagatatttttccgttgttctccatcatcgccatagatatatcatttatatcaaagtaacccaagagcctgcactcggtcaaaaattcgcttacgtctatctttgcttttctcaaattttctttatatagttttccgttttcaaataaaaccaaagacctgccgccaaagaatcttctaaacttcagagatttaacagccagcaaatcaataaaatatactaaaaccgcgtatatagtcatagcaagaagcggcttcataaaactaccgtcaaccgttgttgccatttcggcggcgatagaacctatactgatgccattgatgtagtcaaacatagaaagctgagacatttgtttataacccagcagctttgtcaaaacaaacaatgcaataatagaacctaccgaggctgccgcaactcttagcaaatccatagtcatcaaaaacacactccattatacacaacaaaattttattagcttataatggattattctgctttatcttccaataaaatatacattaaaatatatgttctgtttttaaaaggctattttgtaattttatttatttgtctacggtaaatatgcagtaaaatcaacataacctatttgcatcacaaaatatattaatttatacgtaaaagttgatttttaaaataagatacgatataatatttttaaataaacagccaaaactttatggagatacaaaatgaaaaaattatttaactattgcaggctttgtctaaagctgctgtcaagaaatttgagcactctattggcatttgaaattatttattcggttataacagtttttcttatctatccgatactcagcttttctattgataaaacgatgtcgctttccggactcacgtatctttcaaacgataatattatttactatctttcaagacccgccacaatttttatatggcttgcggttttattagtgagctgcctgatggtaatatttaaaattatgtctgtaacctggtatgttcatgcctcttataatcagaaggatatttcaattgtgcaaatgtttaaactcggcggaaaatgcacttttaagccatttaaaagcggagttatattgatatttttatataccctgcttttcaccactgctatttcaggattcaccggagtggacgcaatccctgaatttattcaggattacatatatgaaagcaacattttatctatactaatgtttttcttatatactatattgttcatattatctattcgcttctctctgaactatacatgcttctgctttgaatcgaaaaattttgtatcagcaagcaaaaaaagtctggcgctgaccaaaaagaacttttttattgtattattgggcagagttgcaccggttgtgcttatattttttataggctttattataaaaaccgtattttcagttagctcaatacttattataaaattcttctgcgaacccgatatgcagtatctatattcgctgaaagccgtccgtgccgcagatatgataagtattgcagtgcaaactttaagtttgaccatttcctatgcttctctcagtgtcatatactataagctgaaaaacaaaaaacaggaaccgattcccaaatatattcctccaaaaggaaaaaagcacatacttctcaactatgtatgtttaggaatagtatctgttatttttataggatttactattctgacagccgcaggcgctcctgacgactttgcttttgatattaataacgagcctgaaatatcggcccaccgcggcagttctgtggattatccggaaaacagtattccggcatatgcggcggcgatcgaacaaggggccgactggatagagcttgacgttcaccaaactgcagataatattgttgtgatttcccatgacgctaatataaaaagaatagcaggcgtagataaaaatatttgggaaatgacatatgctgaacttgaaacatatgatgttggttcgtggttttcagacgaatactcatacctgagactaccgactcttgatgaagtattaaaactatgcaaaggtaaaataaaacttaatatagagataaagccaacaggtcatgaaaccgatttcgaaaagaatgtcattgacattgtaaaggcaaacggatttgaaaacgactgcatgcttgcttctcttgatatagaagcgctgaaaaaggtcaaagagattgaccctaatataaaaaccctgtacgacatgactgtggccgcaggaaatatttctgaaatgacttttattgatgggttcagtattgaggaaacatttatagattatgatatagtagatcagattcaccagaataataaaaaagtgtttgtttggacagtcaatgagccatcgaatattattaatatctgcaaatatgacatagacaatatactcaccgacgacccgcttactgccagagaagttatcaatgaagaaaaactcagcgacagtacagtggattttgtaaatctattttttaaagaagaaatgaggacccaatatattaaccaataatataaacgccgagagtacatcgtgctctcggcgaatgttaataatctgtatatgcgaaataatttgaatatgctatatgaccgcagaccacattgttaggtgagtaggcgttggataatatattagtataacttttagttttatattctgtccgcgctgctcgccttacgcgccgcataaatgcggcctaccgatgctcactattaccaccttttattttgttatttatatttctttagattctcaatgatactgtttaaactatatataaaaatagaaaaaatttttataaaagcttaaaaataaattattatgaaaagttaaagatttcgttaatttataacttttacttaataaatttttagagtttttcaaatttcaggagatgtaacaaaattttttaagaaaatgaaaatgaactatataactctttatcctaaaacctttaatgtctgtggataggctacgaaaaactggacaaaaaagttaagttcatatgaaaaaatgtgatacagcaagcatcggagggcaaactttgtttgcctcgtaaggcgcgcagtcccggaaaagtttataattaaaaagaattattacaaattgttctaagtatattcacgccccgcgtgaaacgagcgctcgcctaacgcggctcacttgtgtgaaacacatcataatcagcaatttcgttcggcacaatcttaaatttacatcaataatataaattaatttcattttgggtaaaaataaaattcaaaacaatcacttacaggtatatgcggtccattcatccgactgctttgcttcaactatcttcaaaccggctttttcaagagctgattttacctcctccgccctttcattgataattcctgaacatataaaaattccgtctttcttcataaatctacgaacatatggactgagtgcgataatcacatccgctacaatattggcaacaacaatatcgtattctgcaaacctgtcccgtagaccgctgtcctcaataatatctccgatataaacatgataattgttcttatcaagtccattcatttcaagatttgaatatgctactgtttcagaattttcatctatatcaaccgcacaagcgtctgacgctcccaggagcaatgcaataaccgaaagaattccgcttccgcagcccaggtccaaaacagtgtcgccctcgtgtatattcttctctatctcttctatacaaaatcttgtactgtcatgagaacctgtcccaaacgtcattcccggattaaccttaaaaacaatcctgtccgtctcagactccaaaggctgccactccggctgtatcaatattttatcaccaatttcgagaggtttaaaatattgcttccaattttcagaccaatcctcatctcttacattttcagtaataatttttaaagaaccgaagctattatttatatcggcttcctttaataacttaatagatttttctattttctccagctctgacaaaccatcattgccgccgtccagatatacagttatctttgtatccgcttctttaagtctctccagttcctcatccacataatcccaatatttgcggttattctccaaaaattctttgaaatcgtctttatccgcaatttccagcccgtcatatcccaaatcatttaaaactgagctaaccgggtctattcctttatttgttgtaataatgctgacttttatccaatccataaatttctcctcaaaactttttttacattatactacaataattcatttattacaatattgacctcaaaaaataatacatttactattagtatagctttagtattttaaataaccgcgtcacttatcttttataaaaattattattttaatatattaatttttagattaatgtttatattatactgttctaagcatattcacgcttcgcgtgagatgggtgctcacctaacgaggtgtgcataagcacaccctgccgatgttcaccaaaaatacctaaaaagtccagatgttaagacaatttataatatgattgtataaaaatgtggtttgcaagcatcgaagggctgtgatcacactttaaaaaagtgtgtgtaatacaaagtgatttgtattgataaacctacagtgtcaataatcaaacttagttgtgatgtacaaacggagtttgcctcgttaggcgcgcagtcgcggtaaagtttactacaaactgttctaaatatattcacgcttcgcgtgagatggtagttcacctaacgaggtgtgcgtaagcacaccctgccgacgttcactagaaacctttaaatcttttttattttgtataaaaacagactgcactatatacggtgcagtctaatatattttattcaaacaaatcttttagcttatccataaaggattttcgctttttatatttggacgggtcaacgctgtcgtcaaactgtcttaatatctccttttgcttttcgtttatccctttcggtatctcaacctgtaccttaacatactggtcgccacggttatttgagttcagcttaacagcgccttttccctttagtctgaacacagttccgggctgagttccctcagggatattgtatacaacgcttccgtcaacggtaggcactttcacctctccgcccagcgttgcctgtacaaatgaaatcggataatcgcacattatgtcactgccttggcggacaaaaatcttatgcggcttaaccctgactgtcagaagcacatctcctgccggtccgccgttctttcctgcgtcgccctcgccgcggacgctcaggctctgcccgttatcaattcctcccggaatattaacgtttatcttcttgcttcttctgactattccctcgccgcggcatgttctgcacgggtcggtgattatagttccttttccgccgcaggcctcacaagttctaaccgtctgcatactgccgaacggtgttctctgaactgacttaacctgacctgttcctccgcaggcagaacatctctcaggatgactgccctcagcggctccgcttccgtgacaggatgtacattgttccatatggctgatagttatttcctttttagttccaaagcaagcctcttcaaaagtcaaatcaatgtgcatatggatatctccgcctctttgcggagcgttaggattacggcgagacgcccctccgccgaagaagcttccgaaaatatcacccaggtcaaaatcttcaaagcctccgaatcctccaaagccgcctccgccgtatcctgcagcggcattagggtcaacgcctgcatggccgaactggtcgtatctcgatttcttatcagggtcgctcaaaacttcatatgcctcgctggcctctttaaatttagcttcggctccggctttatcatccggattaaggtccggatgatactttttcgccagttttctatatgccttttttatctcgtcagccgacgcgcctttatttacgccaaggacttcataataatctctcttatctgccatacttttattccttcctgacacaattgtttatattactcggattctgtataatcagcgtctacaacgttgtcatctccgccattgttctgagctcctgcgtcctgtgcacacgcagctgcctgttctgcctgcgcctgctccgcagcagccttataaagcttctcgcttacagcatagaacttctttgacacttcttccgtctgagtctttactgcttcaacatccatcggcgtagccttgagcagttctttcagcttatcaacttcagcctgaataccgctcttttcttcctctgtcactttatccccaagctcgcccaaagttttttcggtctgataaaccatgctgtctgcctgattgcgaacgtcaacttcctcttttgctttcttatcctgctctgcatactgctctgcttccttaacagccttgtcaatatcctcgtccgaaaggttggtgcttgcagtgattgttattgcctgctccttacctgtgcccaaatctttagctttaacgttaacaataccattggcgtctatatcaaagcttacctctatctgaggaactccgcgcggtgccggcggaatatctgtgagactgaatcttcccaaagtcttattataagccgccatctcacgctcgccctgcagaacatgaacctcaacgctggtctgtccgtcagcagccgtgctgaacacctggctcttgtttgtaggaattgtggtgtttctatctatcagctttgtgaacacgccgcccattgtctcaatacctaaagacagcggtgttacgtccaaaagcaccaaatcttcaacatcgcctgtcaaaactccggcctgtacagcagcgccgatagcaacacattcgtcagggttgatacccttatgcggatcctgatttgtcagcttcttaacagcgtcctgaacggctgggattcttgaagaaccgcctaccagcaatactttatcaatttggtcagccgataacccagcttctttcatagcgtctcttgccggacccattgtcttctcaacaaggtcagctgtaagctcatcaaacttagctcttgtaagggtcatatcaagatgcttaggaccgctggcgtcagcagtgataaacggaagattgatatttgttgatgtaacgcctgacagttcaatttttgctttttctgccgcttctttaagtctttgaagcgccatcttatcctgtcttaaatcaataccgttatcctttttaaactcatcagcgagataattcataactttatcgtcaaagtcgtcgccgcccaaacggttgtttccgcttgttgccaaaacttcaaatacgccgtcgccgatttcaagtatagatacatcgaaagtacctccgcccaagtcatataccataactttttggtcaacatctttagctagaccgtatgcaagtgaagcggcagtaggctcgtttataattctttttacttcgagacctgcgattttgccggcgtcttttgttgcctgtctctgagaatcgctgaagtaagccggaacagtgattacagcctgagttacagtttcgcccaaatatgcctcagcgtcactctttaacttttgaagaatcatagccgaaatttcctgaggtgtatatttctttccgtctatatcaacttttctgtcagtacccatatcacgcttgattgagctgattgtcttatccgggtttgtgattgcctgtcttttagcaacctgacctaccaaacgctcgccgtcttttgtgaacgcaacgactgacggtgttgttctggctccttcagggtttggaataaccgttggctctccgccttccataaccgcaacacacgagtttgttgtacctaagtctatacctattatcttgctcattataattacctccaataaatttattttatatgattagtaaaattgttaactagattaataactaatttgaaaccttaaccatagaatgacgtatcactttaacattgtcatccctgttataagcgtaacccttagcaaattcctcaataacagtattggaaggcaagtcgctgtcctccatcataaccgcgttatgcttatccgggtcaaactctttcccaacagcttcaatttcactcactccaatacctgagagcgcttcacagaactgttttctaaccatttttattccctcaagcagagcttctttgtcatcattgctctcggcagccgcaatcgctctgtcaaggttatccagcacggggagaagcttttcaacagcttcacaaattcctaaagagaaattctctgttttctctttagcggtgcgcttcttgaaattatcaaactcagcaacttttcttaaaaatctgtcttttgcttcttccagcttttgagccaaagtctcttcttcattattttcaggattctctgtctcctgaaccggagtttcagccgattcgtcctgctgtttttggtcttccatgcattcctctattttgctttctttattatccatagtttcctgctgattttcttctttagatttcacttttaaccatcctcttttccgccgttataatcgaaattttcatcatcgtccggtctgaatctgctgctaagcatctgacccaaattttcagagaagaactttatgcctgaaacaactttagcataatccattctctgaggaccgataactccaactatgcctaccaaatcttctccgacctggtactgggaaacaacaacgctgttctctttcagctggggaagcggaagttcgtcgccgataaatatatccacgccgccgtctccttcaaactgaaccgcgtccacaatttcgccaagcacgttttcgtcatcaaaaaattccaatatatttttaattttttccacatcattatattcaggataccgcaggatattagacgtcccctcaacaaccacctgtttgctctcgatttctctctgagcctcatatataagctccagcacagatgaaaggatttcaacgttttctccaacagcgtcctttatacccataacattgtcaagacttataaagccgtctaaatcaagacctgatatattttcatttataactctgttcagctctgcaacttcctcaggcgtaacagtattcctcagtctcagcagcttatttttaataagacctgaagagtctgaaacaataaccattatcgttctgccgtcaacgtcggccagcttaacatttttgatattgccgtatttattcataggaagcatagcaaacgtcggcaaactcgtaatggaagaaaatgctgacgacacgcccttaataatattgtcaagctccctaaagttattcatcatagcggctctaagcctttttatctccaaagccgtcatttgatatctatgcattaagttgtcaacataaaacctaaatccggcatttgatggtatacgtccggcggaggtatgcggctgaatcagcattcccatatcctccaaatcacacatctcgttacggattgtcgccgcgctgaggttaagactggtctttttagcaatgcttctggaaccaacaggctcagcgtttttgatatagtcttcaacaatagcctgaagaattagcttttttctgtcatccagcgatgccataagcctgccctcctttgtataaaacaatttacttgttagcactcacacaagtcgagtgctaacctggtataataatagcaccacacccaatctttgtcaatagcttttcacaaaaaatttgtaaataaatttttaacattgagagtaaattacttgtgcaaattgcggatacaggtataatttatttcattaataatgtttcttcatatttccataactatgttgttatttacccacagcttgattaatttattaaccggctgattaaaatattacatttctttcatataaaatatacaatagatttactcaaccggttatgatatactcttaaatgcagaataaaattaaaagtttttaagagctgtgaaatgttcaatattttgttataaatatattttaagttttataattaccggaaagtctccaaaaaaacagacaaacaaatcaagtttatataacaaatatttataaaaaatgtggtacagcaagcttcggaagagtgtaactgtgaccgcacctgtagggtgcgtgtgatacaaattaatttgttttgaataaccttcaataacaattgcggctacatggataggatacaaaaaatatggtacagcaagcttcgggagggcagatgaaatctgccgcgtaaggcgcgcagtcacggaaaagttcattataataagattcataacaaactattctaagcacctctacgcttcgcgtgatatgacagttacctaacgtggtgtgcaaacacaatacatcacaactaagcactttgtattacacccaccatactggtggggtcacaatacatcacaactaagtaatttattatatgacaactaagttaattattggcatctatattttgtataacacgatatagtttatataacatacacttttaaacaaaagtgtagccgcaattgacattgaaggctataataaaacaagttactttgtattacacccaccatactggtggggtcacaatacatcacaactaagtaatttattgacattgaaggctataataaaacaagttactttgtattacacccaccatactggtggggtcacagacattgcagagtaatcaaacttggttgtaatattatacgtttacacatctcattaggcgctatatcaaaaaaagacttttaaattttatgatatattttataaaatatagattattataaaaatatatttttaggagagataaaaatgactgagaaagaaaaagcaaaagcaggatacttatacaacgcaaattatgattctgaaattgtaaatgaaatcgaaaagtgcactgatttatgttatgaatataatcagattaaaccttcagatgaggaaaacaaaaatcgtctgctaaagcaaattattggaaacctgggcgaaaacgcaaaagttaccgctccgttctggtgcgattttggatataacctgtatattggagattttttctactcaaatcataatcttgtaatcacagacggcgccaaggttgaaataggcgaccatgtatttattgctccaaacgtgtgcatcacaacggccgaacatgcgattgacgctgaacaaagaaacgcaggtttagaagtggcaaaaccgataaagataggaaacaatgtttggattggggccggcactgtcattttgggcggtgcagaaataggagataattctgtaataggcgccggaagtgttgtaaaaaaagacattccgcccaatgttatagcatttggtgttccctgcagaccaatacgtcaaataaccgaggaagataaaaaacgttatccgcaatacccaaaagataatatctaaaactttttaaaggcataaaaataagaagtgtttttagtacagcagggcgtgcatgtgcgccttgttaggtgagctgctatctaacatgcagcgtgaacatacttaaaaaagtttgtcattaacccttttggctaataaatattctctgcttttaatattatatctacaccaataaaatcaatggaggtcgacagcacttgaaaatatacatgcgctattttaccaaatataaatactggttttttattgctgtatcatgcgtagctctagaagctctctgcgaccttttgggaccgacgctcatgtctcatataataaacgacggcatagagcttggtatgatacagaacgtatacctatggggcggacgcatgatttttgctgctgctctgggcgcagtgttcgccgtctcaagaaatataatagccagcaaagtttctcagagcttcggagccgatttaagatacgatttattttcaaaaattcttaatttcaggcagggaagcgacgataaaatcgacagcggctctctaatcatcagaatgacaaacgacgttacccaacttacccaattcgtaaacggcaccatgagaatattttttaaggctcctctaacctgtatcggcagtataatcctcgcttcaatactcaacctgcggctcagcataataatctatttggttgttataatagtcggtctgctgttatatctagggatgaggctgtcatatccccggttcggaaaactccaggcggcaatggaccggcttaatacggtagttgaagaatacttaatgggagttaggcttataaaagcgtttggaacatattccgacgaagcctcaaggtttgaagacgataatgcgaaccttatgaaaaaaggcgtgcatgctcaaatagtaataacctttatttcacctatactgacccttgttgttggtttaggctccgcggccgcactgcttgccggaagcaggcttttcactctaggtctgacccagcccggtcagatttcagcctttatagtgtatatggcgcagattttaagttctctgctgatgataacaaatatatttaatacttttgtaaagaccaaagcttcagtttcaagaataaccgagatactaaactgtgaggatgatttcaagaactcagagaataactcagacgccgttatttcaggtacggttgagtttaacaatgtgactttttcatatcccggcggcagcggggttccggctataaaaaatttatcattttatgttcctgccgggaaaagcctagctgttataggcccgaccggctcagggaagtctacgctggcctggctcctgctcagattatatgaccctgacaagaacagcagtatcatgtttgacggcaaagatataaaaaaacttgatattgaaactgtgagaaaaagcgtcgcccttgtgcctcaaaaagctatgctgttttccggcacggttctggacaatataacatggggcaacccaaaagccgaaaaagctcaagttgaagctgcaataaaagcatcaggcgccgatttcatatatgaaatggaaaacggtatcgacacatacttaggaagcggcggcgttaatatttcaggcggccaaaagcagagaatatccatagcccgaggacttatcaaaaactcaccgattctggttcttgacgacgctaccagcgcccttgatacactcaccgaaacaaaggttagagacaacctcctgtcagaagataataaatccaccgttatcctgataacccagcggtgttcgacagccatgtttgctgataatattttggtattatcggacggagaacgcgttggattcggaactcatgacgaactgcttgaggaatgcagcatttacagagaaatatttgattctcagattggcagtatcacggaagggatgtgataatatggcaaaaaatattgagctgcctagaatgggaggaccaaaagtaggcggagccgccaggttcagcaacaccgagagagcaaaagaccaaaaaggcactctgatgcgccttataaaagtgtatatgcgctttaaaggcatagttatctccgctgtatttcttacattgctggcttccggaatatcagtattgattccctactttgtgggtaagactttcaacacatttaacaccgagctcagaacggttaataatcattcccttataattttagtttcggttatagccgctctctatctgtcaaactggctgataacaacaattagtgatacggcaattttaagtgtgtctcaaaaattggtcaggactttaagaagcgaaatattttctaaactgcaaaaacttccgctgtcttttttcgacacaacaccgcgcggcgacaccatgagccgcatcaccaatgacgccgacaccataagcacgacaatcgcacagtcggcaactcagcttgcttctgcaatactcacaatctcaggctcgcttatcattatgctttctctgagcataccgctgaccctggctgttttgacctgcgtgccattggtctacatactcacaagagtaatcgctaaaagaagcagaaaacatttttatgaccaacagcgaagtttaggcgagataaacggtattattgaggaaagcatatacggacttaaaatgataaaagccttttccaaagaggaaagcacacaaaccgatttttcaaaggtcaaccaagagttaaagaaaagcggaaccagcgctcaaatatgggcgggatatatgatgccgctgatgaacataataaacaaccttactttttcaataaccgctatagtcggaggaatactctgcacaaaatacggtctgctgataggaactgcagtcagctttatgacgtattcaaaacaattcgccaaccctctcaattctgttgccgggctgttcaacaatattcagtctgcgcttgccggtgcggagcgcgtctttgagatactggatgaaaacgaggaagcagcggattcggaagatgctttagacttagataatgtgaaaggcagggtggaatttaaagacgtcagcttttcatacagcgatgaaaaacaaatactaaaaaatatttctttcaaggtaaaccccggacagaatgttgccttggtaggtgaaaccggttcaggaaagacaacaatcgtcaatctgataaccaggttttacgatgtggattcaggcaaaatattaatcgacggagtaaatgttaaagacataaaacggaaaagtcttgaaaactgtttttctgtagttctgcaggataccagcctgttcaccggaacgatattagacaatataagatattccaaacccgaagccactgaaagcgaagttataaaagccgccaaactttcgcacgccgacggatttatcagacggcttccccacggctatctgactttggtatccggaagccaggacacgttaagcgagggacagcgacagctgattgcaatatctagagcattgctgtgcgacagcccgatactgatactggacgaggcgacaagctcggtagacacaaagactgaaaaagacattcaaagggcgctgattcgtctgatgaaaaaccgcaccagcataataattgctcacagactttcaacaataagagacgctgataatattatagtaatagacaaagggcagataattgagagcggaaaccacagcgagctaatggctaaaaaaggcagatattatcagatgaacgccctaaaatcagttgacggctgatatataaatatttaattttataactcctaaagatataacctgcggttctctgcagcttacaaacatatctattatatgaatctatacttcagataaattattattgaataaaaaatgagaggaatctatatgaatccaatggaaacagatgatattgtattaagaaaagcaaaatttgaggattgggaatcaatgtacaaaaatgtttggtcaagaccggaaacagccaaatatatgcaatggcaaataaccaaaacagaagaatcagcaaaagagagaataaagaaaaccatcacttatcaaaagacgcatgatacatacttcatatacgaaaaagaacatggtcaggctattggctttgccggggttgaggaaatatccccacatatttttcaggacgccggcattgcgctgggacccgaatataccggcaaaggcttgggcaaacaaaccttacagttattgcttgaatactgtgccaatactttgagaggaaaagagtttttttattcaacacgggctaataacaagatatcaaaagctttggcattatcctgcggtttttcttatcaatattctgaagaaaaaatagatttaaaaaataaagaaccttatatattagaggtctacagccgaaaactataaaaccggtttaagccgttttaaaaattacttaccaatacaagcaaataaatattagctgtacatccattaaggagtggttatttgcatttacgagaactttataaaaacgaaatagaaccagccctaaaattggtctggaaagtatttttagaatacgaagcgcctgaatacagtaaacacggagttgacgaattttacaatagcattcatgacccaaattatttaaacagactgcattggtatggagcatttctaaatgctgagttggttggtattatcgcaacgcgcaataaaggatgtcatattgcgttattttttgtcgacggcagataccataataaagggataggaaaatctcttttagagtttataaaaaaagacagcttaaccggtaatatttccgtaaactcttcgccgtttgcagttccaatatatcaccgcctcggattcgagaacaccgactcagaacaaataacaaacggtgtaagatacacacctatgaaattaaaactgccgacggcttaaaaagtgtgtatgatacaaagcggcttatatcaataaactggaaatgctgctatatattgcacaaaaatgttaaggttatataataaaaattatataaagaatgtagtatagcaaacaacggtatggctgttaccatacttttaaaatgttaactatccattctaaataaattttataataaatatgattttgcaagcattggaaggtgtaactgtgaccccatcgtccgggtttgtgttataaaaattcactcttacatttacgtcctctttattctaatcattacattgtaggcggaaagtcaacagaaaacaaaacaaaaaatcgaatgtattttatacttctttttattattaatgaccttaaaagtttctgtccgctttattatgtcctttccatgatacccaatgttcgaacagaataaataaaagttaataaaaaaatcgttttataataaaaacacgcaatgttctaaacaaaccaaaacttaggtcattagaacatcacgtgttttttagcgtttctgaagtctcaataatttctatgcctgtgtgaacataggagtcgataaatacctctcgcctgtgtcaggaagtacggcaacaatagtcttgcccttgttttccgcacgttttgcagcctgaacagccgcccaaacagccgcgcctgacgagattcccacaagcagcccttctgtctttgccagtttcctcccggtctgataggcgtcactgtcagcgacggtgactatctcatcataaatctctgtattcaaagtttcgggaataaatcctgctcctatgccctggattccatgaggacccggctttccgcctgacaaaaccggagatgattcaggctccaccgcaataatttttatattcggattcttagattttaaaaactttcccactccgcttatagttccgccggttccaacacctgaaactaaaatatcaacattgccgccggtttgctcccatatttccggtcctgttgtttcaaagtgcgcctgtggatttgacggatttgaaaactgccccggtataaacgctccgggtatttcttttgccaattcctcagcctttgcaatagctccgttcatcccctttgagccctcagttaacacgagctctgcgccgtatgctttcatcaagtttcttctttcagcgctcatggtctcgggcattgttataataactctgtatccttttgaaactccaacagaagccaaaccgattccggtatttccgctggtcggctcaataataaccgacccgggctttaagtcaccatttttttccgcattctcaatcatatttttagcaactctgtcctttacgcttccgcaaggattaaaatattcaagcttagcgataacagacgcttccagactatgactttcttcaatacctgtcagttccagcatcggcgtgtttcctataagttcagtaatactctttacaactttactcattgtttttccctctttcagacaatttatattgtaactattatatcaaaaatatgaaaataataccataccattcaaagtttttttcacaaagcagctcaatcatgctttaatgctataacgtaataggtgcctcaaaacttaattaatactcctgcaaaacggaggtatttgttatattgtttcaaaagcgtctcccagcgccgcaatcaagtcatctgcattttcaagtccgatagagagcctaattgtatttggttttatcccttgttcctccagctcttcggcgctcagctgtgaatgcgtggtggttgccggatgaattaccagactttttgcgtccgccacatttgccagcagagaaaaaatttcaagattgtctataaaccgctgtgcctcttccgtaccgcctttaatctcaaaggtaaatatagaacccgcaccgttcttataatacttttcataaagctcatgcgttggttctcccggcaaggacggatggtgaacagcctcaactttttcatgattatttaaaaattcaactattttaagcgtgttttcaacatgcctttcaacccttaacgaaagagtctcaagcccctgcaaaaacaaaaacgcatggaacggtgacagagtggctcctgtatccctaagcagaaccgccctgatttttgtaacaaaagcagccgctcccacgtctttagaaaagctgactccatgatagctcggattgggatttaccaaatcagggaactttcctgagccttcccaatcaaactttccgccgtcgattattactccgcccagagctgtgccatgccctccgataaactttgtagcgctgtgaacaactatatccgcgccgtactcaatcggccttatcaaataaggcgaggtgaacgttgagtcgacaactaaaggaatattatggttatgagctatttttgcaatttcctctatatccgaaacattggaatttgggtttcctaaagtttcaataaatatagctttggtgttttcctgaaccgcgtcttcaaaattctgcgtatctgacgggtcaacaaatgttgccgtaataccataatccggaagagtgctggcaagaagattgtaagttccgccgtatatggttttggaggacacaatatgttctccgcttttggctaaattttggaaagtatacgttatggcagctgctccgctggcaaccgccaaagcggcaacgcccccctcaagagccgctatacgctcttcaaaagcgctctgtgtgggatttgtcagtcttccatatatatttccgccctcacgcaaagcaaacctgtcagctgcctgctgagaatccttaaacacataagacgagctcatatatataggaacagcgcgggcacctgtagccaaatccgcttcctcctgtccgacgtgaagctgtttcgtttcaaacttccattcttttcttctatccatctgcacttttcctccattcctagttttcataccaagtaagtatgatatagattatagcacataaaattctaatgtcaagaactttttataaattttatccattataaaataattttatttatatagcatataagcagatggtatttctaaataatttatatacgttattaattgtgatatattgcgtacacgtcctcctcgttaggtgagcagtcatctcacgcaaagcgtgaacgtatttaaaacaatttgttatatcctatttaataataaacttttccgtgactgcgcgccttacgcggcagattaaatctgccctccgatgcttgcaaacacatattttttatatatgatctttatatttctgttggttttactataacctctccatattgtaggtggagttcaagagaaaactcgcccccaaatggtgtttttagtgaacatcggtagggtgtgcttacgcacacctcgttaggtgagcagtcatctcacacatagcgtgaacgtatttaaaacagtttattatatcatatttaataataaactttaccgcgactgcgcgcctacgcggcagatttcatctacattgagtattcataataatgacattgtagattatggcaaaataaaatcatatgtataacacacactttttaagaaaagtgtggtcacagccctccgatgcttgcaaacacatattttttatatatgctctttatatttctgttaattttattataacctctccacattgtaggtagagttcaaaaataatttgccccaatttatttattactatatattgtgtttttaggatggttaaaatacatagttgcttagtaaaatgttagcagcttaaagacgttaatatggcggacagaaaaattaatttgaatacaaaaaattcgttttcctaatttataaactgtgacttaacctttttaaagtgcacgtgttataattaaattaacttacaatagctttcaataattaagtatcttttactagaactgctattgaatgcacagcgttcatataatcagacagcataacattatcataaaataaaatttaaaattttaccgggactcctctgcttttacagcggataaaacctgatttgataatgcagaaatataataaaatatttatataaaaatgtttaaactttttaatatatgttatataaagttatatctaattttatcacaaaaaattcaattaaatatatttttattttcatatattattaataatacttcctctatcgcgtttaaacttaaaaataatcttttttctatttattaaatattaaaaatatacctaaaaagacacttttatatttcttcttagctctctgataatattttttctataactgttttaatctcattaagtcctgcttttatacgtttatcgtcaggttttacagataagtttaaatataagtttactttagaagcaagacgataaattctatgaattttatattttatatttttcacgtaaatttctcctttaaatattgtgcactaatacttagtgcatttgtgaaattatatcacatttgtagtgtaaaatcaattcataaatcactaaaacttagtgcagtattaattataggagggaatacttatgaataagaaaaaacatattagcattagagtagattcagattttcttaacaagttttattatgtcgccaggtataacggcagaagcggcagcggtcaaatattgtatttaatgcgctcgcttattgacgattttgaaaaagaacacggcaagataacaccggaggatatagaaagttttttaaacagcaaataaaccggcaaaataggtgaaaatataaatcaatgtatttatgctttaataccctaatgtgtgaacaaaatccaacaaacaatttatataaatacttctataaattattttaatcggcaatataattttatttaataaaatataattgtaacccaaaagcagtaaatatacagaaaggttaaaaacaagaaacttttagaatataataaaatctgtactgatatattgaaagtgtcgtttaacatgtgaaatcctgcggcttacaggcgatatggcataaacaagcactgacatatgcgcaaaacactttaaatcttcacccatataaacgtatgtaagctgaagcttgctttcaattaataaagactgtggctgatgatttgcagccacagtcttattaactatgttatttatttttgttcctttactgaaagatagacgcttccgattgttgtgaaaataacaatatagataatacatatcaaagtaaaatttaaatatcccccttccattagacgctgaggcgcattggaattcattccaaacgccataagcgaatatgggtatatatgaccgaaaccttttgccagcgcggctaaacccgaaagtccgcctattaaagctataccgacaggggctgcaaagttcttaattattaaagaaaccaaaagctgggcagacaccaaaactattccgcccaaagttccgcaccccagccaaacaagcaattccgaaggaagcgcagagtcaatacccgccaaatttcctgaaacaatgaataaaacacctatccaaacctcgctgataaccaacataaacgaagaaattatcagctttgacaaaaacacctgccaaaccgggacgggcattgaaagcaccttattccagttatgattcactctttcaatactgattaaatatgagcagtaaatacccagcattatcggcagaaaaaaataacatgtaaacagagtgttctgtgtccagagactataccagccgttttccaatatttccagattggctgagtaattcaaagtgcccagcaaggccggaattatcggcataaatataaaagcaagccacagcggcgctctttttaatttttttctgtcagcgtttataatacttaaaatcatttttatacctccttgcggacaaataaagtccgtcctataaaataaaaggctacgcataataatatcgatactgaaaacataacccaattaatatccattaagtaaaacgtgcttatccttgtcactttgtcccaatctcctcccacaaactgaagagctccgtaatgaccccaaataaccgagtttcttatccatgggtattgtggaagaaacagtgcaaataatccaataaattctccaatcgctccaataaaaaacggaactgcctgatttttaaaaagcatagaaacactgaattgaaaaacatatatttccacggccggaactattgtaaacataaaatataaggcatacaattctataggaaacctgccgctgaatccaaaacatctgcctgctatatagactgcggcaaactgtataagcaatgaaacaattataatagataagctatatataagtttagcgtcgtacagcctttgcttcggcataaccgaacataattgtttcatcattgaggtttctataccggcaaatcttgaggccactacaattgccagcagcggcataaaaattgtattcaaaagcggaagctgatagagcatcatcatccagccgctttttaatgcgctctcattatactttccatataatccccagcataacgccacagcggttatggcaactgccataacaaaaatatattttcttcttgttttcttatactcacaaaataaatatctcttcacaggctctcctccccttttgttaactctaagaaaatttcctcaaggctttttccttctcccatagtatgaagcgcttcaagactgccttgaaacatcatacgccctttagctattattccaatatcgtccgccatttggtctatctccgaaagcaagtggcttgaaactatcacagtcattccatactttttcggcaaagaccgtatcaaatccctgatttcctgtattcccgacgggtcaagcccatttgtcggctcgtccagtatcagtaatttaggaaacgccagcatcgctgaagcaatcccaagtctctgcttcattcccagtgaatacgccctgacctttttctcagcctgggactcaaggcgcactattttaagcaccttgtcaatattagattttggaactttgagtatagtctgaattatttccaaattttcttttccggttaaatgtccgtaatacgagggcgtttctatcagagagccaatatttttaagaattttcattctattttttgagttaaaccgtttgccgaatacatcaatttctccgccggaagggcggacaagacccagcagcatcttaagtgtggtgctttttcccgctccgtttggtcccaaaaaaccatatattttcccttcgcttaccgtcatatccaaattactgacagacagtgaatcaccatatcttttagataatccgaacgttcttactaattgatttgacatgataaaacttcctttctcatttaatttataacgattttaacacctcattctttcatcagacttaacttaaccttacgctgaccttaaatcagaaaaaattaaaaatattcgctttatctatcagccgattatggtataatacagtcaggtgataaaaatggatgaaataaaaaataaaaaaatacttattgttgacgatgaaaaagaattgttaaagcttcttgaaaacaaactatttgaaagcggcttttatcacatctttaaatccgaaaactgcagcaatgctttgcaaattgccaaagaacaaaacatatcccttttcgtgcttgatgtaaaccttccggacggcaatggttttgctctatatgaggatatacggaagttttcccagtcacccgttatttttttaaccgcgcgcggcgaagcggacgacaggctcaccggtctcgggctgggagccgatgactatatagtaaaaccgttccttacaagtgaatttgttctaagagttactgccgttttaaaacgaacttataaaccggttattaagaatacagacattaaactctcggacagagttataaatcttgaaaccgcttcagttaaatttagggaagaagaaattccgctaactgcaaaggaatttataatcttaaaaaaactttatgaaaacaaaaaccgcatcgtgacttatgacgctttatgccttgccgcatggggagacggttactacggatacgaaaacacattaatggtgcatataagacgtcttagagaaaagattgaaacagacccctcaaagcccaaacatattattaccgtaaaagggcttggatacaaactggaggtttcagacaatgaataaaaccgccataaaaatatttacgttttttatcctgcttgcgtccggcatatcaattttattgctgctgataaactttttcagcttctctatgacggcggctgacacagcaaaaatatatcccgaatctcagacaaaaactctcagccgcatatcagaagcatttacctacaccgaagacggatacattcttgccgatgaaactgccgttccgcagggttcgtggtgtatacttatagatgaaagcggaaacgtagtatggggtcaaaacgtgccggacgatattccggcgagctataatataaatgatattgccgttatatcacgctggttcttaaacgactatccggtgtatgagaaagtctgtgactatggtctccttatattgggatatcccaaaaacagcgttggaaaatataatattgagttttcgatgcattggttcgataccctgccgcaaagaatactggcggtactgatatttaatctttgccttgctatattattagcctgcgtttttggcaacggcctatataaaaaaataaaaatgctgatacaaggtatacaaaacttaaaacaagaaaaacctgtacacatgtctgaaaacggtatttttaaagaagtcgctaagaacatcaatactacatctgtttcaatagaacgaaaaaatcaaataatcaaacagcgtgataccgcacgttctaattggatctcaggcgtctcacacgatatacggacgcctctttcggtaatactcggatattctgaagaactgttttcggaaacagacggcgaaaataaagaaaaagccaaaataataacagaacaaaccttaaaaataaaaaaacttattgaagatttaaacttagtttcttctttagagtatgacatgcagcctaaccgaaaaaaagagataaagatatgcactttaataagaaacatagttacggatatattaaacagcgggttatccgataaatattcaatagaattaaatttaaactgtgagaatgcagtaattatgggggatgagccgcttcttgaacgcgccttgttcaatctcataaacaacagtatagttcacaacaaagacggatgcaaaatttttatatcggcttggcaaaatgatactgacatatgtattaatataaaagacaacggcgccggtgctgatgaaaaaatcttaaccaatttaaataaaattccaaagactgcccacggacttgggctgcctatggcctataaaatcataaccgcccacagcggaacatttaatgcaaaaaataaagacggtcttgaaatcgagataactttgccttttaaataaacgtattttataaattttcaaacatacaacaatacgccataaagcgctgtcttgtgccctatggcgtatacgtttttaagtctacaaataattatttttaacaaatatcacaaatgtcttacaaaatttttctttttattttataatataacaaattacaataaattttttaatgttttaacatacggagataaaagtggatattatagcccgatatattagcgataaagacaaaacacaaacaattttaaatcattctgaaaatgctgcggttctttgttcaaaaacaatgaaaaaagcaggtcttgggattttgggatacttgacaggattgattcatgatatgggaaaggcgtctccctagtttcaggaatacatacgcaaaaacgacagttcggcgcgcggaactgttcatcacgcacaaaccggagctctatatatttaccgaaacttttatacgtcggcggcagacgttatcgagcagtatacagctcagcttattacagacgcggtttattcacaccataccgggctttttgactgcattaccgtagattcgaaaaatggcttcttaaacaaaatgaatacaactgacaatttttatcaaaaggcagccgaaatattttttgaaactgtaatcagcgaaagcgaaattaaagaactttataaaaaggctgttgcagaagtaagagattttacagcaaagatgaaaccattcaacgctttttcccgcggaatgctgcaaaagcttttattctctgctttggtagacagcgaccgctatgacgcatactgctttgaggctgatattgaccctcttatagctgagccgattgattggtcagaagccgtaaataaaatggaagccaaagccgcgtcattttccccaaacacaacactaaacaaaattagatgcgaagtgtctcaaaaatgctgtgatttttccgataacaaaggaatatacaggctcaatgttccgaccggcggcggaaaaacactgtcatcactgagatttgcacttcatcatgcccaaaagcataattgcggccatatttattatgttataccatacaccacaattcttgaccaaaccgccgacgcagtcaaagagatttgcggtgatgatatggttttggaacaccattcaggtttcatcaacgatgatgacgaaaaatattcattatatacacagaggtggaacgcgccggtaatacttacaacagtggttcagtttcttaactccatatataaacgaaaaccaggctgccagcgccgtatgaatgccctttgcaactctgttattattatagacgaggttcaggcggtacccattaaaactttaagcctatttaacgaagcaataaactttctgcacaaagtatgcggatccactataattttatgcacagccaccatgccgcagtcaagcaaaagcgaacatccaataaaactcagtgttcctcctgatattgttccttacagttcagaaactgacggagctctcaaaagggttaaagctataaatctaagcgataaaagtatgaactatgaagaaatagcagagttcgtcaacgaacgtttaataagaaacccgtctgtcttgctggtgtttaacactaccaagaccgcccgcgccgtatatgattccataaattctgactgccggaaaattttgctaaccaccaaactctgccgtgcacatagagataaactaatcaaagaaattaaagaacggacgcaaaagctgaataataaggccaatattgattcagctgaaaaacttgtggtaataagcacccagctgatagaggccggcgttgatttatcattttcgtgcgctgtaagagctttagccggtattgacagtttgattcagacggcaggacggtgcaacagagaaggagagttcaacggactgcgtgaagtatatcttatacgggccgagggtgaaaatctctcaagtctccctgagatagcaaaagcaaaagaatgcactgaagccgtgatgtcccgcagaaaaaatattgatttgctctcacgtgaagcaatagaagcgtattacaacgaatatctaaaagtcccaacaagcaatttaagcgagtttgactatgtggtaaaactgcctaaagaagattcacttgtttgtctgctttcgaaaaacgaattttcaatcgaatctcacactgcaagacctctgccttttttaaaacaagccttcgcggcagccggggataatttttcagttatcggcagcgaaacatattctgtgcttgttccatatgaagacggagctgaaataattaacagcttaaacggacgctcagaaatcagccaaaagaccaaattgctccaaaagagttatgcgtacagcgtatcgctgtatgaaaatgaaatacggcagctgaaagacagcggaggaatatttattatagaagacacaggaacatttgttctcaacagaaggttttatgatgaaaattacggagtatacatgaaaccggatttagaattttaaaatattaaagaggtgatttttttgaacaaagaaaacaaaataagctttcgccttaccggacgcaccgcactgttcagcgaccctataaccaaagcggggggcgaaaagttcagctattcagttcccacatatcaggccttaaaaggcatatgtgaaagtatatactggaagccgacgtttatatggtacatagatagggtgagaataatcaatcccatacgcaccgaatcaagaggcatacgcgttccaaaatatcaaaacaattctaatgacctgtcaatatatacatatttaatagacgccgagtaccaggtagaagcccattttgaatggaacatgcagcgagaagagctgtcggctgacagagatgagaataaacactttttcatcaccaaacgtatgctggaccggggcggaagacgtgatatttttctaggcgccagggaatgtcagggatatgtcgaaccctgcacttttggggaaggaaacggttattatgataatgaaagcatgtcatttggcataatggttcatggtatcacttatcccgatgaatccgggcttgaaaaaatgcagacccggctttggaatgctcagatgaaaaacggaattatagagtttatacgtcctgaagaatgttcaatagtgatggatactgaaaaatataaaatcaaaccatttatacccggaaaaaacttttcaggcgcagaagaatttgaacgcgggggggtatttggatgagctggataaacgctctctgtgagacatatgaaaaattaaaagacagcccggaattattaaaacgctgcagcatgcctcttgctcctccttcccacaccgttcaaaatgctcacgccgagatatttctgaatgaatccggcgagctgctgcgtatacgtccgctgacaaaagcagaagcaagaacgataaccccatgcactgaagattccgctgtgcgcagcagcaataacgcgccgcatattgtttatgacaacttaaaatatatagccggcgacgcgcaaagatacatagctaagcaagataattcaaaaaattatgaaaaatactgcgcccagctttctgactggtgcaatgacgaaaattgtccaaaccaagttaaagcaatatataaatacataaaacgcggcactgtgtttcatgacttgatagaatccggtttaatacttccggaggaaaagttaaaatggaacggcgacaaagacaataagcctgctgatatattaaagactgttgtacgttttcgggttgaggataaatacggaaactcttttgaatgcaacacaaattctgaactgatgaattcctatatggaatacgaccgcaaaaaccgcaaacaaaagtctatatgtttcgtcagcggaaccacccaggctgtaacctataagcaccctacaaaaatacgaacaaccggagacagcgcaagactaatctctgcaaacgatgaatacggtttcacatatagaggacgattcaaaaataaggaaaacgtattctcagttggatttgaaagctctgataaagcacacagtgcgctcagatggctggtcagtaaccaagggttttcaaccggagaccaaacagttgtggtttggtgcgtcggcggcgaggatattccgaccccgttacaggacacctatgacataacggctggcggcgacccgtttggagatgaagcgccggcagcaatttataattctgaaagacagtatgccaagcttgttgagttggcagtaaatggatatatatacaaaatacctgataatgacaatgttattattatgattttggaatcagcaactccggggcggctgtctattacatactaccgtgaattttcaccaaacgattatcttgacagaataaaaacctggcatacgacctgcgtttggaatcacaaatataaactagtcagcaagattttaccggacggaaaacaagaattaaaacatattgagttcaccggcgcgccttcaataaacgatattatatatgctgcctacggaagaaatgttgacgaaaaacaaaaaaagcatttgatggaaatactaatatcctgcataaccgacggcaaacgcatgcccaaagattttatgaacaagtcactgcaaagagtttcaaatcctcactcttttaatgaggactgggaattgagcaaagcgaccagcataacatgttcaattataaataaatacatatatgatacgaaagggatgaactacagcatgtcattagatataagcaacaaagacagaagctatcttttcggcagggtattggcctatgccgaacaaattgaagactatgttttgtataaatcaggagacaagcgtcctccgaacgctataaaacttagaagcaaatacagaatacagccggccaaaacgcttatggtaattgatgaaaaactgcttccgtatgttgaaaagctttatagttcaagcacatggctgtacgacgagatgcaaaaagtcattgctgaaataagcgccaatgactttatgaataacaaaccgctcgacccacaatatttattgggatatgcttgccaaaaagcagaactattaaaaaaacatgataaaaaagacgaaacaaaagaaacggaggaaaactaatgagtactttacaaaacaaaattgattttgctgtggtattttcagttaacaaagccaaccctaacggagacccgctcgacgggaacagaccgagaataaattatgacggatacggcgaggtatcagacgtctgccttaaaagaaaaatcagaaaccgtctccaagacttgggagaaaaaatatttgtacaatctaatgaaagaaaagacgacggctttgacagcctccacgaacgcgccgacgcgtgcgaagaattaaaagcaataaaaaaagacgttgataaatatgcagaaaccgcctgcaaagaatggatagacgttcgcagtttcggacaagtgtttgcgtttaaaggcgacaatctatcagttggagtcagagggcctgtaacagtccaaaccgcggtgagcattaaacctatcgacgttacaagcatgcagataaccaaaagcgtaaacagtgcgtccggaaaagcaaaagcgtcagacacaatgggctcaaaacacagggttgatttcggagtatacaaatttttcggcagcattaacgttcagcttgctgaaaagacgggctttaccgaggaggacgccgagcaaattaaaaaggctctctgcaccctgtttgaaaacgattgctcatcagcaagacctgacggcagtatggaaattttaaaggtatactggtggaaacataactgcaaagcagggcaatactcctccgccacagtacacaggagtttaaaagtagttgtcagcggcgaaggcaagtcgcttgcggattattctatatcagttgaacctctaagcggccttgaagcggaggagtttaatggaatataatgaggatgattttctgcctttgggaggaatccagcatttcgctttctgtcccagacaatgggcgctcatatatatagaacggcaatggaaagaaaatctccgcacaattgaaggcggcatatttacggagcgagcatatattttggcgtatttgatgaaatgatacttcagcaaaaggacgaatttctgtttaacggaagaaacaagcgccctcctctagaccctgtaaactctatgctgtcctatgtttatactctgcttgcacataaaacatctgccgcagccgaggcggccggcttagacgcatatgtaggcttcctgcaccgtgacagacctggcaggctgtcgcttggatttgatttgatggaagagtttaggagcatactggccgacagatttgtattaagcctaataaacagacgggaagtcaccatagatagtttttctcaaaaagagagcggagcggttactatctgtgatgaagcaagaaaaacgattctgagccaatggcagaacaaaaaacaagagacaatagcacatcctttcacaaaagaaaaaatgcagtggggcacggcaatacttgtacaagcacagttgctggcaagatatatccgcggcgatacggacgcatatcctccattactatggaaatgatgtgagtttcatgcttgttttaatcacatatgatgtaaacaccgtaacccccgccggaaagacaaggttaagaaaagtagcaaaacagtgtgttaactatggtcaaagagtacaaaattcagtatttgagtgttttcttgacgcaggacaatcaaaaatgctgttacataagttagagaaaataatagacaaagaaacagatagtctgcgtttttattatttcggaaacaactacaaaagcaaagttgagcacataggtataaagccatcacactatgttaatgaccccctaatattttaggtgcgaaccgtaagctcacatgatttccccgggaggttcgcaccgcgtttttacaaaaatatataataagaggcattcttataaacacatattatattaaagatttaaatattatgccgcaatataacaattataagaataaaaatataccaattttatacatttttgcagtcgcaccctacacgggtgcgtggattgaaattatactactgtttgtactgcaaatataatatataaggtgatgaataaatgactaaaatagtagatgatgttgattgtccaatgttgaaaaaagaaatagaactaggttattgtattgaattacagtggattgttgatggcggagtaaaaccaacaaaggatgaagagtttttaactcaaaagcattatgaaatttgcagaaattgtaaaaaaagaatagaccctagtttataaatgtgtatagataaaagctgtaaaaattaaaaaattttaacaccagtttagcaattttaaattttaaaatagaatcagagaaacctaaacatgagaaaataagtcacccactatgcgtatgtgtggattgaaatgttaaacttacaacggatgaattaaagaagttgtgtcgtgccttatgcgggttcgcggattgaaatatttgctgcctttccattaatttttaccgtaagggagtcgcaccctacacgggtgcgcggattggaaattgttcagactgatgagagcgttatatgtgttcgtcgcactctacattggtgcgttgatttggcgcatccaatatggatgcgccaaattatactattatgcctcgtattcaaaactcacattatttgactttaaagaaaacagcatatcgtcatttttataaaacctaaactccccggcgcaggctgctgtttctattatcgttcttgtcatctcacctttgcttggggcgctcagctcttgtccgttatttttgtctatatctatctccagtttatatttcccctgctccaaaattattttgtctttggcacactttataacctttactcccaaatatgtcgccattctatattcagtcccattatactgaatgatacaaatgcagcctttaaaatgaaatcccaaaaatggtatatccgcaacagaagccataattgagcagggctcgtcaaaatcattagcctgaacccatacatatgaagacggaaacgaccttccgctgtccttttctatatatcccaaaccgtttgtgaagtctatttcttttccgtttagtttcagcctgccttccagtgtgtggcgcatacttatgattccgtgcctgcactccattggaaaatatttaaagggccccattatatcatattttataggagacaaatcccggtactccaaatcgccgtttaaggaaatttcatcagtttttatatttaaactaacgcccttatcagaaaaatagttctcacctataaacggaacattgtatgaagaatccctggttattacctgtataaactcctctgaatttgacctgcccacaaccaaagaaagaacatcgtctcctttttggtgtttataataatatccgtcaaaatagttacccaatatcaacacctccggtcgcaggattatctatcaaatccccgtttttttcaaaccttgagccatggcatggacaatcccaggtgtgctcagccttattccatttaagcgcacaccccaaatgagggcagcgttttaaggtcggcgtcagcaaatttgttactgcttcaaaaccgttgacaaaaagctggggctttaaaatatttctgcttggattaaacagtggttcatattcactgctctttccaaccaccaaatctgcaagaatttcagccgccgccatagacgatgtcattccccacttgttaaacccggaggccacatacaagtttggagtggttttagagtaacgtcctatatatgggattccgtccaaactcatgcagtcctgagccgcccaataaaatttttctttagctttaggataatatttttctgaaaattctttaaccgctctccagttgcctccttgctttcctgtcctgtgacctcctcccccaatcagcaaaaggtcttcataatttctgaaagacataccgttttcagcttcatcaatatacataccgtcaacattatctgcgttttcaaaggcaataacatatgaacgcttctgatacatctttataaaataactgccgtgtttatttataaacggaaagtgtgttgcaacaattattttatctgccaatatcttaccgccgtcaaactttgtccaattttcacttatatcggttataaaagtattttcatatatattcagcccttttactatttcatttaaaaacttcattggattaaactgcgcctggtttttaaattttacggcgcctgctgtcttgaatggaaggcttgtctcagatgcaaattctgcattaaatcccagactgtttactgcgcttacctcatcctcaatcttttttctatcattaatcgaataaacatacgcatcttttgtttcaaaatcgcagtctatattttcagctattaatctatactctcttagagctttttcattagcggataaatacatttgggctttttcacgtccgactgattttatcagcttattataaatcaacccgtgctgagacgttattttagccgtcgtattttttgttattccatatcctattctgcttccttcaacaagtatataatcaatacctttttgctccagcatgtacgcgcatagtattccgcatatgccgccgcctataattaaaacttcagttttcatttctttgtccgcttttgggaactcaggtaatttaatactgtccgtccagactgattttttcatttttattcctccgcaccattgcttttacattttattatttccgaaatcagtcaataaattcaatatgcttcaacagatataaaatctaactctaataaataaaaaatagaacgtaataaaactatctttttcaaaaatgctgcaaaaaaacagcgctcttttcatggctaaaagcctgaagagaacgccgttttcccgcaattattaagttttttatgtggtttactatcgcggctttattttttacagctctatataatttttatttctgtcttgaaaataatttatatttaataaaactattgttttttatttaatcccaaaacataaatcatgatatgtttaaaaatttatacataaaaacatcttatgtggaatttaaaaaataaaacatacctaacgacaattattttttatcttaactttataaataaatttatttgctgaataaatattaacaaagaaaagaaatatttataaataatctaaaatcactttccattcatttatcaatttatccagtgaatatgcggcgttggcagggctggtagacggaagctttaccgcttcataatcgcagtccatatattttttatatagtttatgcgctgttcctccgtttgtaaaaactgcttttatatcagaattttcaattatattttttatatcattcacactcacattctttatcgagctgtcagacgaaccaattatatcacagctttttataacatcccatacggcaatgtgattatgaattaaaaattctctcttttcttcaatcgtttgaggacattcagaacgcgtcagtcctgcaagaactttccaaaatctattttgcggatgaccgtagaaaaacttcatttctcttgatttaaccgaagggaaacttcccaatatcaggatcttagaatttttatcatacaccggaggtatagggtgattttccataaaactaatttctccttttttaataatcaaattaaaactattatatcactcatattctattttgcaagtttaaaagccgctaaatattgttgagccgctcagactgccgataaaattattaaaagtttaacattatacacaaaatttaatgtttagcctctatcgtctaaaaagtgaatatgtgtggctgcagatgagcgcacagcatttttgagctgtttttatccttcaatcagcttcaatggcagttccatagactgattaaatctcacttgtttgcacaacttttttctcaaaccgcttttttctgcatgcaaagcgacccaactgttgacaaagcataaagcgtttgacattatacacaaaatttaatgtttagcccctatctttctaggggttaaaagtccgctattttctgcacgctaaaaggctcagcattaccgagccttttaaaaacacaatatgggattttattttcttatattattttaaacctgttaaatattcaacagtttcagggtcataatgggacagaaataaactttcggttccgtctaattccaaaattctttgcttatcctcttttgaaagttcgaaatcaaaaatattaatgttttctttcattctttctttatgcgttgtctttggtatgactataatatcattttctataagataccttaaaataacctgagcaactgatttattatgactttcaccaatttcttttaaaaccgggtttgagaaaatattatttttcccttccgcaaacggcccccatgactcgagtttagcgccgtactttctcatccaatcatgagcatttctctgctgtaaaaatgggtgcgtttccacttggtttaccgccggaagcacttcattaaacttgcagaaatcaacaagccggtcagggtagaaattgctcacccctatagctttgacttttccggctttataggcctctgtcatagccctgtatgttccgtaataatctccgaacggctgatgaataagcagcaaatcaatataatctgatttaagcttatttaaagactcctctattgaggcttttgctctttcgtaaccgctgtttgaaatccatacttttgttgttataaataattcctctctgggcagaccgcatttttcaaccgcatttccaacgccctcctcgttatgatacgcctgggctgtatctattgacctatatcctgtttcaatagcgtcagacacacatctttcgcattcctccggattaacttgaaacactccataaccgagtataggcatttttacaccattgttcaaagttatatatttcatattatatccccttattctaaattattatatgcttcatctgaaacaggctccagccattcgttataagcctcttcggctggaacctcaacagctaaatggacaaaaacactgtcctttgccgctccgtgccaatgctttacttccggcggaatattgacaacgtctccggcgtgtagctttactgctttttcgccctcagcctgataccagcctgagccataagtaacgagcagaatctgtccgcccttgtgatgaatgtgccagttatttctgcatcccggttcaaacgtgacattacctatagaaactcctttttcagtgagcatgttgagatacgcttttccgctgaaatattctgcgaacatttcaggcagttctccgcctctcggaaaaataccaatattattcattataactcaccgccttgcttaatattctctgtccacttttctatttcgtctttctttgtcttcatcgccgttccgctgaatttaagattaagaccgcttttgacctctgcgccccggcacatatcttttatatcttcaaaggtgtggccgagccacccgccgtttgttgcaaaaggatatataacctttccgctccaattatttcccgacagcactgttctgacaggaggagcaaaagtataccaccagaccggcgagcctaaaactacagtatcatattggctcaagtcacattttaaatccactatctcaggctccaccctattgtcaacttccttttttccttgatttacaaccaagttatagtccccttcataatttttgacaggttttatttcagctatatcaaaacctgtggctctttgaatcattttagccactttttctgtgttaccgctgtatgagtaatataataccagacctttcataaacagacctcctattaacgataagattttttaactatctcagcgcagtcctcatgacccaattcacacgggtcagcttcaaacaatcctcccattgtctcacgggcgttggctgctataacatcggcttcactttcctcaattccgaaatcactcatttttaaatctcctacaccgcaatcgttctgaagtttttcaagagcagtgataaaatcctcagctttatccgcgttctccattcccagcgccttagccattttaacaaaacgctcgtcacaaatatgctggctgataaaatacttataatactctttagaaatcattatcagaccggctccatgaggcaaatcctggtgataggcgctcatggcgtgctcaatagagtgctcgcttgtacagctgctcaaggtcattacaactcctgataatgtattcgctaaagccacatgctctcttgcctcaatatcattcccgtctttaaccgcccttggcagataattgccgatattttctattgccgttaaagcatacatatcgctcataagatttgagcactttgcaatataacactccgtactatgaaacaaagcgtcaaatccctgatatgctgtgaaacgcggcggaacagttttcataagctcagggtcaacaaccgctattataggaaacagctcatctataccgccgaatcctattttttcgttagtttcagggttggttataacaccccactggtccacttccgaaccggttccggcagttgtggttatagcaactataggaagcggagtattttttatcggcatacctttgcctgtctttccaaaggcataatcccataagtctccgtcattagttgctgaaacagctattgcttttgacgcgtccataacactgccgccgcccaaggctactatgaaatcacagttgttttcacgagcgaactttccgccctcctcagctgtggctttaagcggattcggctgaatcttatcaaaaacaaccgtctcaactcccgccttgctcatttcactttttacagtatccaaatatccgttttcctttgttgacttgccgtttgatattactataacagctttctttcccggaaactcctgttcatgcagttttttaacagctcctaaaccaaataatattcttgttggtacatacatattaaaactcattttctattcctccattgacttgatttaaattttgtgatacaattcttaatgttcaaatacattatacaacttaaagttaactttaagtcaatacctttttttgaaaatttttctatttttttggaggaccggttatggtttatacaattggggaaatggctaagagattaaatgtggctccgtcaacgctgagatactacgacaaagaaggaatgctgccgtttattgaacgttccagcggcggtataagaatgtttcaggaaaaagacatgtcttggcttcagataattgaatgtttaaaaaaaaccggcatgcctatcaaagatataaaagaattcgttgacttatgtattgagggcgatggcactatagacagacgtctcgaaattatcactaagcaaaagaaagctgtcgagcggcaaattgaagaaactcaaaaaatgcttgatatgctgaattataaatgctggtattatgaaaccgcaaaggaagccggaacatgttcggttcatgaaaatttatctgccgaaaatattcctgaggaatttcataaatttatttcatgtaaacacagagagtaaaattaaaaattttatttaactaactatattaccgtaatctgccaagagcttttttataagcagataaaaacatttaggacgtttcacgtacagccgattttatcagctgttataaatcagcctatgctgagatgattttcagctgccgtattttttgttatcccatatatcctaaataaaatcgacaattgtatttaattaaaatatatagaatcttcttaacttccgaatatgttatttcttataaaaataacatataattataatatggcaggtctgaataattcagacctgccatatttttacttatctgatttgtatttaataaaaattagatttgcaaacctttcagcacagctaatcaattataaattatttttattccggcactacaaagtttttggcctctgtcaatccatatccaattaaataatcacgcactattttaaggatatgaccgtaacattcggaagtcttcgcggcaaacccttttttatccccatgttttaaacattcaaatgccttttgacttttaaaattcagtaaatttgcggcttgactgccgtctctgtaaaaagcataataatatcccccgtaaattatttctcccgtttcctctaatattgtttttaaaggacgtaaactcacatacttatttatacattcctgaatacaatcaagatttatggaatcatgacaactcattttttcatccaattcatttataacatctttatctatgttttgaaaggctgactccgccgcagccttaaccgttatggtcataagctgcagagcgcttaaatacattaaagtatcccgcttgtattttttattctttatacttttcatcgccatttctttattctgcagcatagcttttgttccttttgcattaaacgttttggcaacccctagttcattcagcattaaaatagcttttctgactgttgatacgctaactccatattgttcagaaagttcagcctcatgcggcaaaaatgtgtccggcttatatattccgcttccgattttatctatcagttcccgagctatttgagtataataatgttctcttcccctttcagccgcccaggaatagtcatactctccctcttcgacattcggatttttttcggccattatatccaaatacttttgtattgcgttaattaccgcgtcatacattaatccgaatctataaattatttcgcttctgttcccggtaagcaatgattccattacccacatcgaattccctatactttttgtatccactaactcaataaatccgtcatggcttgaaaaaagcggaagcctggcatatacctctaaactaacaaataaatcgcggaacagtaagttatttgatttttccaaaatatcataaagaaaatcagaagccacgctccatctgctttgcgtatcttttttcttgctgcggctcaaggtcttttcccataaatctaaatatttctgaccgcaaacctgagacgaaaaacaaaacagttcaggcatcaacaaggccatggtttgataaacttcaacaataaatgatttacgctccaatacatacttaaccgctgattcttggctgtctttattatcgctgtagataacaaccgcagcctttctctcctctgtcttaatatatccctcgcggcttaaagctctgaaaacatcttttactgtccgtattcctatattatactgttcagaaacactgttcatcgacggaagactttcaccgcatttaattctgccgctgactatctgttcttttaaattctcatataaatactcaaataaggtggttttatctttcataactcttctcccgataaatgtttttcttagattattataacataaaattcattatttaacaattagctatatgtatacgtactcaaatatcttattgttttaataaaaaaaacatgctaaaattattacacaataattatgatatagaaattcaggagttgttaaaatgaaaaaaacacaagacgtaaaaatatatagtatgtctgtaagtcctgttattcaaacctgtattgtttctataattctaacggctgtaataacttttatgctatggaacacctccgggctaaacacggttcttgaaaacagcaccaattcttatgtcaaagacgcgtcatttcagcaagccaatgatatatcatcaaaactaaactcttttgaactggctttggaattattgagcgactctattaaaaagttaccaaatgaagatttgctggaagaatttttaaacagaaaggcagaaatattagatttcgattctcttatcttgcttgataaaaacaataaaactattccctcaaatactgaaaacctaaacaatttatccggcataaagaattcatataacggcgaaaaatcaattacatatattgaaggtcaaagcctggtattttccgttcccgtagaatctaacggtgagattaaccaagttctggcgggcgtccgcaaaaaagaaaacatacaaaacctaatcgcgccaaaaagctttaacggaagcggcctttcctgtattattgacaatgatggcaaggttgtaatttcaccaacagatgtaaagccgtttattcagcttgatagcatatttatggccaaagatgaaaacaagacaaaaaatgctattgaagaaatgaaaagtcatatgtccagcggagaacccggagtattcaattttacttccgtaaacaattcgcgccttattctttcatatcatccgctgggcataaataattgggtactgctgactcttgttccggctgatttaatatcgggcgaggcaaacaactatatattgcgctcgtttataatagtcggtatcgtcgtacttatctttgctttgtttctgattataatattcagatattatagaaaaagcgaaaaccggcttaaaaagtttgcattctcagacagtcttaccggagggttaaacaactccgcttttcaattggagtgtcaaaagttaatttcagaatcaccgcccatgacttatactgttataatgatgaatattaaggggtttaaacttatcaatttaaattatggaattgaaaccggcaatgatactattagatatatacataaagtattaagccaccatattaaagaagacgagatgataacacggagtgaagcagaccactttttcttatgcttaaaagaatctgacaaaaacgttatacaaaaacgcattgatgaaatgacagccgatattaattcatacgcgcaaaactctgatattccacataatataaaaatctcacaaggcgcatatatagtggaggagcccggcttaaacataagaatgattcaagaccgcgcccgcacagcctgtcagcttcaaaataaaatttcagattgttcattttataactctgagataacaaataaaatgattatggaacagaaactttgcagtctgtttgacgactcaataaaaaacaatgattttcacgtttatattcagcccaaaataaaccttaaaaacggtgaaacaggcggcgctgaggcccttgtaaggtggtttcatcccgaccgcgggattatctatccgtcagattttattcctctgtttgaaagaaacggaaacataatacagctggacctttatgtatttgaaaaggtatgtgaataccaaaagcaaagaatagacagcggaaaaaaactttttaccatatctgttaatctttcaagggtacattttagaaatttaaattatctgcgtccgtttattgagctgaaaaacaagtataacattccggatggagtaatcgaacttgaattaacagaatcaatattttttgataaccaacaaatagaactggtaaaaaacgcaataaaccaaatgcacagttatggctttctatgttcattggatgatttcggagttggtttttcttcactgggacttttaaaagaatttaatgtcgacgcaatcaaactggaccgaaagttttttgaggatataacaaactcaaagagccaaaatataatcataagttttatagaccttgccaaaaggctgaacatacacgttgttgcggaaggtattgaaacttctgaacagttaaattttctcaaaagcgtcaattgcgatatggttcagggatatattttttcaaaacctctgcctttaaacgaatttgagaaatgggcggacagccgagaaaacaaatgtgatgattcgctcgtatataattaataaacaagccattttaattatcgcccgccggaaaaatcttttaaattaatccggcggacggtaaaacaaattttataagctgatataaagatttatttctgcattttcaaaatcttcattaaggtattcctcaaaatccgccttataacttctttcaagattcattttccatatttcttcccacgcctcggcaacagcgtcaaccatatttccgcgcacagaaaattttgcgtattttcctccgggaatggtttttatgaccatatcgtcattatccgcttcagttacctcacagcctgccgtcacacaataattatcaccctcgtagtctgaataaagacctatagcgaaactgttagctctgttttttatcttggctatttctccgcccggatacagccttgtccacaagtcacctatttttttctgcatttcagggtcgttattggatgtcactgcgcttatcccaaccacggttttgggttccaactcaacgatttcatatttcattttattacctcctaagttttgataatgctattataatactattaatatgacaacagcatgtcatattttataaaataatatattaaccaacccgggcttatcttttatttaacaaaaaaaatcaaattttttcccgcaacctaataaaaactgccgctcagtattgacacataattctatgacattcatttgctttgatatactcaataatataaaaatccataatccgtttctttgaactgaatcatttttaattaatttatacctcttaatctaaaaatattgtttagtcttatcaatgaacggaacgttgttataacaaaaaggcgccgtgagaggcgccttataatctgacgattatttattaaacgttttaattttgtatttcggattccgaatccgtaaatatccacaaagtctcatggctgttctctccgtaattcttaaattttaatattctaagcttcagccaggagccgtcctttttttgatataaaaattcaggcgttatattatcactcaatttcatttttaaaccgttataatcacacacgcttttaaaatactctatatatttcggtcttacatttctagcagcatatagcagcagggctttgctgaatacatcacctgtctcttttaaaattttttcaaaataaaacggtatatagaggtgtctgactgtatccctgtctaaatcgacaaaatatacccctttgaattcaggagctaaaaccgagagaaacgcgtcagcgtcctgtttttccaaaaccatcttttcaacctgcttatccaaactgcgtgaacttctgaccgctcctccttcacaataaaactttcttttatcatctctcatttttgcttctgcttcattaattatcaaatcgtatctgttaaaagattctttccaggccgttcccaccgacaacgcataaccttgatttttaagttcgtatcttacagctttaattttctctgaaatcacagtctcagtcttattttcgcttaaaattacgaactcgtctccgccaatccgataaacgccgtcatcgccaaaatttcgctttaatgcattcgccacagctttcagcatatcgtctccggcttgatgaccaaggcaattgtttatttcatgaagaccgttaacatcaatataaacacagccaaacgactttggtttattactcgataatctttccaaagcggcgctgaaactgtttctgttcaaaagccctgtcaagttgtctattcttccaagtctctccagctcataatgagcttcataatggtttaaagccataaaaaagcttagagaaacctgtctcagcggaacatcgctttcccaacggcgcttcatattgcaggcgccaaatattattgtcagttcacctcctgaacctgataccggaataagcataagattgttaatattaaactgagccaagttctttcctccgacaggaaattcctcagaaacagccttcatatcatagcttaatatgccgcccctttcaagaagaatattaaaaagtcccgggaacaattcagacatttcattatcttcatctatatcaaaatcaatgcccgaaccgttataacaatacttaatatcggaatgcccgttgattatccaaaaaaacgccgcttctgcagttaaataatcagaaacctttttaagtgctctcttaaaattctcaggatgcaaatgcgcgtcaaacaattccttttcaacttcatgcatatactgaacgttcttgagctgttcatccatctttaaattttcacgcctgacatccttaatcatccatataaaataaattaaaacaatgaggaaaaacgacagagctaatccaaagaagaacctcatcatcacgtttgcctgagaaaacacctcatcctcactgatgctaagcaaaatcatccaatcttgtatgcctacaggtgagacgtatgaataaagatactcgcctgatgtttgagacaaaaaaatcgcggagctggattttccggcggcaatatccgaaacaaattggtcgctgctgtaaccttttttggtctttctatcgccgaacccatacatgttccccagcgttttatgctgtgtgtcctgcaaaaaattacccgtttccctctcaaccaaataaatctgagtctcattgccataatctgcggcaggaaaatatacaggaagcttattaaggtcaaccacaccaataataatggcttcattttcaccgtttcgctcaataggaacacattgtcttaatatataattatactgattttgataatctttttcgcgtttagaaatatgcacaccctttgacagttcctcctgataagaaagcactcctgacatatccaaagtttctccgtcacccgtaagcatcatatcgcccggaagcaaaagctccaaacgcgaaattaaacccattccctcaaaggaagaaaggatttttactatctcatcacgctctgaaatatcatactgttttattatgtttgcagcgccgtttaaaatatttctgtcactctcaagcgttctctttatatcactgccaatttcttctgtgtatccggtcagccggctgaaacatgctctgcgctcaaaatcatagcattccttgcctgcggccgctataacagcagagagcaaaactattaataaaactgttacaataatacgtttgtttttcttcatatacattgcctcatattcatccatacagccatataacacgccaactatatactaatttaatctattaatttatacaacttattattcttgtttatagatttttaatattttttctatttcagacttatacccgctgcgaacctctttaggctctaaaacctcgcagtctttcccaaaagttgagatatagtaataaagccactggtcctttggacacattatataggcaatgaaactgccgtccttatccgcataatattcgtcgaattcatcataaactctgtaagccagctttttcgatattctcatcttcaaccgtataaattcatcgttgaaactatttttttctgtgaaaatcttcctgggaacactcctgctgaaaatttcttcttttattttcacgtttattatgcgggtcagtttaaaaaatctaaaatcatttctaaacctgcagaaagcatatagataccatgacccacctttaaaacatagttttaaaggctctgcctcacgttttgttctctcgcctgaaccgctgaaatactcaaactctatcacctgtttattaataatgaccgacttgattatttcaaacgtctcggcagttttcttataatccgcccaagacgaaaaatctatttccagccaggaatccgctcctccgccaaacatagcgccaagttttttaagcgccgtatcagttcggtccgcccccacagcgcttacagctttaagagaagacagaatatcgtttctctcctcctgcgtcagaaccgtcttattaagcacaaaatcgtgaagcagagaaataccgccgtttctgcccttctcagtataaataggtataccggccgcggaaagaatatctatatctctgtatatagttctggctgaaacctcaaacctttcagccagctctttcgaagtcacggtctctttattgagcagaatataaattatctcaaacagtctgtttatctgcatcttgcttcctttcacattttaaacctaatattttgccaaaggctcaagcgtattcatatcgaagaaaaagaattcccttctaacgcttccttcagcaatttcatatggaaaatccagctcatcaccatttttaagttccaaagtatacggcttagagtcaatcaataaaccgctgccgtcatattgacaaataaacagcgtacccgaaacatctccatatccgcgcacagttaacgtatgcgatttttctactgccatgacagctttatataacatctgattatcatatacgagacgtttatatgtaccgtcatttgacataactataacatcacaggtcacgaaattataattcttagacgactcaacttcaagatctccattaaaaagaaatgtaaaattgtcttgtataaatttaggaagcgaagcaaccaaatccgcagataaggcgccgggttttgcctttctcaattcgtttatcagttcatcagcaacattttccaccgttaaggattcaaactttataacaaactgatattctgttaatttatcatcatcaaacttaatttctaatacccaagaaccgccgtcaggcatcatataattgcgtactgcatttaaatattcaggcgtcaaaacaatattgttccctgagatattatagtctgcgcccagttcaaggggaatcccctcgtcacacgcaacagcgttttctgcggctaaagttcctttccccaaatcaaatcctactgaaagggacccatcgctgttcagttctttttcatactcataagttcttttaattaattccggagaatagtctccgggctccatttttccttcgactttaacagttatactttcctgcccgctaacggaaaaagttccggtaacatctttacaatgatatgtactctggacataagtatagttaccggctggcaaagcaaaactgccgtcggcttttttggcggcttttctgccgtcactgtcatacacactcataattccctttgggtccaaagtctcaaacgttacttctgtctttggcgtgatatcctttgtaaaagcctttatagaacaattggcataatcatatttctcattgcttatttctgtccagtctttcccctcagccgatatatagcttgttcccggctcagcagctaaatgatagtattcagtatacatcttaattctggcttcaaccggcaggctgtatatatagctcgggcagctgtattttactatcactgcaaaacgttctccgtctaaaatcacagggttttgaagttccgcagtgatatatccggcatgatcggtattacctgtgcaaacaggagtatcttttgatgtatcataagacgccggatctattttgtcagcgtcaggaatcacataaatagaataatccgtatcccctcttacacctatagtcacttctgttaaagcctcttctcccggaagcttctcgaatatattcatcccataagaaataccgttgctgtcaggatatccaagtcctcttgtccatcctgcagggtctaaatagtatctgttatcgtattccaaatatggagttgaatcctgataaaaaattaattcatcaagcgtttcgtcataatacgacatataaaaacatccatcgtctccccaatccgaaccccagctgttttgtattatccaagctccgtctgcaggcggttttgctacaaaattgtcagccgaaaagttatcatcccaaccaattatagtaaccgcatgattttgataggtaccgcgctgattattataaaatgagtttttgtccatattatataacggatcgtaactataatacgcacatccagcggctccatatttcattatattatatttagcttcagcaataaattcatcagtggtatcgggtagtaaaaaagtttccttatgcggcatatattcggcttcttttacctgagcgatgggttttattaaaaggtctgccttattttctgcttcaatattattctgaaacggcatttcagattcatcaacgggtcctgctcctctcataaaatatccaagcggagacaaaccatacccgccgccgtccacataacggtttaaagaatcagggtcagctaaatcatttgggtttatagcttctgaattctccatatgacgcaccgaaaagtcaaaaatatttcccggatactgtttctgcattgatgcagcaagcgctgttgtggctgaaaaagcccaacaagttccggtgctcatttgattttttaccggaggtaaatactcataatccctgccgtcatatctttcaggtaaaacactgctgagaacagcgtcattattatgctcttgtttgatttctgccgggaatggagcgacaatcccgcttctctcactttcatctaaatttatatagtctaaaaaatcctgcgataattcctcaaactgaggttctgaattctgaggttccgaaaaaaccgaaactgtaccaaaaaccatcacagcggataatatcacagccaaaaacttaaaataataatttttcatttttatacctcatttctctatatttttttatatttaataccatatacagctataaactcaatagcaatacctttcgcatacaaatgtttaaagattttcagctgatttaataacacacttctatcatctctctaaaacacaaaaaactttaaattaagaagataatatttagtatgcttaattcttacgacagatattttccgccggatgaaccatttaaagacgtcctgcaactataataaatattgtccaaacgttttacaagtgcgtcttaaacttaactatttctataacattcctcctttttaagcgcttgcactacttagttacctgactgcacctgccgcagttaccgcagccgttgcaaataggtctgctgccgcaggttccgcacacttctctgaaatatggaacatacatttcactctccggtattttgtaaccgtacctactctttagattaaacttaattttctttccgctataactgattcccgatttatacgccatctcgctttgtattcttttattgggaatattatatcttttaccgtcctttataaaaaccgtcccttataaaaaccgtccctgtctcaataaaacaaaacgttacatcatattttttacattcgttttgtagagatttgacccaatcataatcacacggacgcgctccattgtaattctctcctccgcagataacctgctcaatttgtccgccgtttaaatacttttcaatgcttaacggaccaataaacggagcgcacataattcctttatgcttaaacggcagctccatcaggataggcaaacgttcatccgcccttttttggttttcacaagttacattaaaaaacacattttcccagccgtctccccaatcattcggcaaatgcttagccacacgttccgggcgtttggtaagcaaataaaaaataacatcgcttctgcttctaataatctcccacgcctcgtctctccacggatccgcttcttctaagaaaaagtctgacgtcatgcaaacccgtatcatctcgccgctttttattttatatccacctcctctgctcttttgaatgggatatcgaaagccatttttagtcttatatatctcagaaccgtcatttccatgcgccttgtccaaaaaatacatatagcagttatcacagccctcgctgcatttaacgcagccatgccacggattccatatatcatgcatatgtaccaccacattattttatattctatagttatattttaacactgacaaaattttttgtaaagcactatttcttatatattgacttcaatggaagtcgttttttgacaattcatatataattctatacgagttttaattcagtatatactgacgttttcttaacctcaaataaaatatttttataattacagtctattatacagcttcagattttttcacgcagcagtaaaaaatgaaaaattgctgtaaagtgaacagaaatgtaagataaaggataaattataacatatgccgggcagttttcgtgttcaaactactgatataataaaacagccgactgcagtaatgcagtcggctgtttcaaatttatatttacttttaaacaccattttaaaaataataaattcgttagtttcttaatcaaaaattttatagttcaaatcaaatacaataaaaccggaaactatttgttttaaatatggttttatatcatatttttaattcattaaaacgatataaacttatcaattattttttacgtttttataatcttccggagtatatccctcctcttgaatctccttaataaactcatccaaatctattccgcttttaattatgatattaattaaacttttgaatgacggcaatctctttccattttctatatcaacatactgccttaatgatatgcagcatttttcagccattgcttcttgacttatgccaaaataaagtcttttatagtataaagtttttccaaagtacaattttaaaatttccatttctccacatcctttgacaaaatataaagatattttatcaatttctcgtacaaaaagatatgtgacttatcgcacataaattctttatcgcggagactttatgttaaaataatgaaactttttacaagctataatactttgtgtaatataaattccgactatgcgagccaatcaattgtgcagatgattataaaaaaataattttatctctgcgataaacggccttgcaaataatagaaaggatgtatcatggctttggcatgttgactttgataaattgggagacgcaaatttatgcagtctaataactgcgtgaataatgctttgtggtttttccatcaggtttaaatacgctgatataaatgacgaacctatgtcaaattaataagcataaaagactgattaaataatacatctgaaaattagctatttaaattttaatattttattttaaagcaaattatacatatcatcaaaaatacaatccgcctgcaaaaatttttattctcctcattcaaaacgccctgaaactaaaatttatgctaatttatattatatattaacacgggaataagtctcttttgaataacaaagcagctttttcattttaataaagcattgtttgaactttatttactgtatgtttatctgacatttggatactatatacttcagaggtgatttttatgtcatatgtagctccaaacttacgcgataaatttgaaagcttaccaatcgcattaaagaatgctattcttgaaaaagacgtacagctgaatactatgtcagaccttatcgcggtattggaaaaaattgttgcagaaggcgaatagccttctgctctgtgacgcaataattttaacttatatatatacatatattagcaatgattttttataatagtcattattttaaattatatatcagactgtttatatgaagaaattttttaattgaaagtccaaataattattacacattatttaatctctttaagacatgaaataaacataaacaaaaccgccgaaaacacggcgggtttagattatttgaagaaaataaatggaactaatcacagtattataacgtctttatcctcctaccgtatcaccccatataacctgcataattacgttgttttttaattaaattcactgattttataacaagtaatacattgctgatttctaaaaaattgtgtacaaaccatttaaataaaaatttactttttggcctttgtaactctgtctttgggcacgtaaccggccttttgaatatctaaaataaacttgtttatatctatctcaccgtttataataaagttaataatacttacagaatattgaaacctctttccgctttcaatatccgcatatcgcctttaatgacatacagcatttttcagccatctttttctgacttggattaaattcttttcttttaaaatacaggacattactaaaacacattttcaaaatttagttccgggacttataattatatcatttgtaatatttcttttccatttacattttatacaaatattctatattatttttgttatataatttaattgcaatatttggtatactgtgataatatttcactaagtgaatacgtttatttttatagaaagggtgctttccgatgttctaataatcttattaactaacaatgtttcattaagttataagaaatgtatttcatataaaattaaaagaagaagttattatgaagaacaaggtattagcactatttttatgttttgtattagttttaggaacgaattcaataatatttgcaaagaatgatactgaagacacaaataacatatgggacagagtttatgttgaagaaggattggaaaatttatataccgattttcctatgatagttaataaagaagttaatgagtttatggagctaaatatcattttagattatgttaaaaatatatccgaaaatgattatgtaaaagtatctatcagtgattacggaagtggcgaatctattgacgaaaaggtccttcagcagaatgaaaaaaatattaggctgaaaaacctagctatagactcaacatacaaaatcaatattgaagaaaccattaacgacacacaaaacgtatataccggtgtaattaagacaaaatatgataccgctgactttcctgttaatatgaaaataggagacaacgaaattcaaaacaactccggcgagacattccaaaatgtatctataaagcaagtcggtatagagcttagtcaaccgaatgaagaagacgaagaatatgatccaataggcataattgagcctgaacaattggaaacattctatgacgaactggaaacgaagcacttttatgagcttcaggttaaagctttaagaaacggcgtcgaaaattattatcgtggttttatttccacatatgaaaatggtgatgatttaggaatatttgtcccaagttattcatttgcaataggagaacctgatgacgttttaacatctaatatatctacatattctactcctgattatgatttttctaccgcattagaatacgaatactataaaaatgtagaatgtgcaataacattaagcaattattatattttctgctttacttttcctgattgggaagaatatacttttgaaactgtaggtaacgttgacactatgctgacattttactctgctgatttaaatggaaatataacaggtcaaccggatatatacagaggcggaggagacggattaaatgccagaaccagtatttttggtacaccgggaaataaagaatatattattctggagtcagatatgtggtctgaagcaggcgttgacagaggtataacaaatttccgcattattagagagtattataataccagtgttggaaatgatgatgcagaaaattatcttgacatagcggaaagtaatgctctggcaggaaattactcaaattatattaatcataatttttatattgactattccggcgatgtagatatctttgtatacaaaaagacaaaaggaaaagggtcttatgattttaaaaatgttgaaataccgttaaaggttgctttttatcaaactcaacaatcgggcggagttgaaaatttggtgcgaataggggatgatataataattcaacccggtgctacgcttgaacagcccattgaattgccaagcaatcaaatggtgtatgtaactatacagcaagctcaaattactaatcactatgacgataatatctatagatatgattttgatttttatgcacctaacatgatggataaatatgaccttcaagccagccctatatatggaaacagtccatattttgcaacagagcttggtatgaactttaatattgatgcaactatacattataatgataaagacttttatgcttttactcccgaatatgatggaactgagtttactgcaacattatattcaacaggaactggattattatataatattgatttatacgacagtatagatatgcgtaacgatgccaactatacatactatcttccaacgccggtagccagcggaatagaaaccggaggcacaaaagttttaacatataataacttaatagccggaaacaaatactacctaagagtttcaagttctaagtccacagaatatgattcgaggtacccatattcattagaaactaaatcaaaaactgtatcaagtacagtgttaaagaataatgttacattaggtcacgcaaaaggaaatgatatagataatacaggtgaatttattgatattatattaaaaaatatagaaagcaaaattggaagttctattatatcttctgaatcattaagaccatatataaaactttatcacaacaatacagaacttaccgcttcatatataaacaatcttgacaccggaaattacacaattactgtaaagtataaaaataatattgtcactggcgtaattattactttaaaagttaatgaattatcctatttaaaagatggagttatctatcccggaaaagatatttggtgggatacttctatatcttggcatgaatacactgaggaatatcctgatgacctttacccgattagcagttttaaattagaaagcataaatgtagtatgtacgggaaagctttatacagttcctaattttgaatttgtatataatgaaatattagctttttatgattatgaaagaaatacaaattatattttaactgctaaagttaataatgatgggaccgctgaatatactttgcgcgatcctaagatttttggtaataaccttaaccagtcaattaaatttagtgaatatacaattattcctatagcgtcagttcattcagatgaaaacggacaattattcttagactctttagtttctggagtatatgtatataaacattcaattactccaattaaaaataatttatcaaatattatggaaatatcctcacaaagaaacagcgctgttgcacttgattcaaatggaaatgtctatgcatggggtgacggctcttattacgacttaggaaccggcagtaaagataatgtttttaatccggtaaaagtcgaaggactgcctaaaatagtccaaattgcaaaaggtaaaaaccacacgttagcgcttgatgaaaacggtaatatatggggttggggcaataattccagcggtgaagtacacggaagcttaaaaggcaaggttatagttcccacacaaatccccgttattagcaatgttgtaagtattgctgcaggtacaggttttagcgttgccgtaaaatatgatggtaccgtgtggacatggggaaataatcaaaagaaccaattaggtgacagagagactaatattactaatgaacccagtaaagttgttggaatcagcaatgtcgaaaaagttacatgcggagacagttttgttgctgtcatatcaggaggaaacctatatacatggggtgataactccagcggacaactcggcgacggaacaaatacaagcagaagcacacctcaattgatcggaaacggttatactgatatcgctgcaggcaactcccatatgcttgccattttagataataatttatatacttggggatataattctgtaggacagctggggctaaataacaaaacaagtaaaaacactcctcaacttgtgtacagcaatgtttcaaaaattggcgccggatataatcacagcatgatggtatcagacggtaaactatacacatggggtagcggcggaagcggacaacttggaaatggtaaaacaggtaacgttttaaaaccgactcttgttccggattttgacaatataaattttgcaggtctagatggcggatacgacttttcattagtattagacagcaacggtattgtatggtcttctggctcaaacgaaaagggtcagttagggatatattctaacaccgtcacagaataagtatacttaacaataggctctttagaaagcactaaagagcctatttaataaatattttttattttaaaacaaaaataataaattacgaggtttttaacatgctcagaaaatttactaattggtatagctatagcaaatatataataataaacaatatttttaaagtttgtataagcgctttaaatattcttgtatttattacggctatagcgtcactttatattgacatagtaaatagacagtacaataatacagctttttcttttattatacttacgttttcttttatctccatagttttagatataatcaattatatatctgaaaaagataaaaaaattattgcttcaagagctaaaatttataaaggaaatacaaatattaacgatgctgaatttatgggttcacatgactataaaaaaattaatataaagattagtgatgtcaaacaaaaaatttatcgtgaagaggctgtactgttttctcaggatgttaacaacagacttctttatggcgaacctattaaaataaattcagatactggttcatataaaaatgtaaaaagatatctttcagaaaacaaaaaaacgcttatgaaatttttaaaggttaaatatattgaatgtcaaaaagacggatctatattttataatgaaaaaaagttatgtttaagctctgaactcacaagtggtatagataccgcttcaatacataaaggcggatactatgacacatatttaacaaatataataaccggttataatcttcattccaatgaagacaattcaaacattctggcttcaacagaaaaattacttcctattatttacaaaaaatcaactatgcaaatattgccgataagcgctacatgttttaataatgaaataggaatctcaactataggcattacaacagataacttccttgtaatcttcaaacagaaccgtcttgcattatcaagccaagatttatatgttccgaccgcaagcggttcggctgactggaaagattacaaattaaataagacttccctggatgacgcggtcatatatgctatgaacagggaactatgggaagaatgcggttttaaaaaagcgtctatactaaaaccgaatacaataggcgatacaaaaatcattgggtattttaaatggttagagaaaaatggaaaacccgagtttattggaataacgaaaataaactcaaaactgacagatattaatccggataaaaaagaagtatataacaagaaagcatttcatattgataacataatagatttgaaaaattttatccaggactttatcaaaaaacaaaatatatcagttccactgtatgttggactaatatttttatcaaactatctcgaaaaagatatttgctctaactgcagccaaacctgtaaagccgaaaattgtaaaaatgtttttaagatattaaaaaaataaaataattttaaatatcggttttaatatagtaaaaatacttttataattataaaaattgaataattgttttgagctgtaaatttcaaaattatttaacttgtgcctataaataaaaaagcggagcgttggctccgcttatattattaaatctatatatgcaaacgattgcggtgcagcagctaaaccataactagatatacttcttggacgactatatttcttaatttctataagttgataagcaactgcatttgttttttctgtataataatcaaaataaattttttcttctatcccagcctccgatttcgtttgttcccatactttttcgggcctgccttcaactattttttccaccttcgcttcccccactactttcattacaggtgaggtagaataaataataattttatttacttgtcttctacacttaatttatctaaattcatattttttactgctattaaaaatattctctacatgctctggattaattgataataatattctgcacatttttaccacccatttctaaaacttttataaactgagacattgttaacttgttaatataaggataatcattgaaaaatccgttactctttaatgttgcatgattcacattttttccttttccaaaatatccattatattctaacactattatcactaaattatatttattataccaatcgttcagttcgtcttttgaaaaaactctcttattcccaacaaaatctataaactctcttactcataaatgatattccattatttttaacaacaatctgattttcacagtataaaaagaagttacaacagacctatatgcagcagcgccataacctttatgaattctatatattaatacagattcaccttttttataatcaatctgactcctaggcgcagctaaaaatattttagtaattccgtttgctgcagcaatttcatctgttttctgattagttccgcataattctgaataaggaaatgaagtatcatgataattatcaccaattggtatataaccacatcttttattattagaatctataaatggaaatgaagtataaccacttttaaatgataaattccttttatcttttatatatacaacttcaccacgcttatttctgccttcagccgtaaatataaattgttcaagcatatttattaatttagtatgtttttcaaatacgttatatagatttgattataattagacctttgccaataccacaacgaaacgtcaatcgctccataaccctattacttcccatatattcccgcgcggtcgttgattattaataacctcattaaatcataagtaagtccgagtttgccctcgctatctcctttaagaaaacctttattaaccagcttagtaattgtcggtcttgcccattcaggcatattgtcatctatgtaatcataaatcattggattttccactttttctaatctttcattcagttcttcatattctctgctcattagtttgtcctctctttccaatttatattctattcccaaatagtcgcaaattcctttataaatcccaaccgcgcatttatattttccgtcatcgcttgctaaaaatctgttatcgtcatagttgtctataaatgcagtttctaccagtatggccggcatattcgtgtgttttattaccgcaaaattagcagacttgacacctctgttatatctttccgtctccgcagcaatatgcggttgtacacagtcagctaacgtcttgccttgtgtgctgcctgtgcagtaatatgtctcgcagccatacgcttttgtgtttgctgcgttacagtgtattgaaacaaatacatctgcatcccagtcgttggcaccattatatctgtatgaaagactgccgtttaagctgcttgataccgtatcggtaatactgtcacggctcatcttcacagtttgtccgctgttaatcagcatatctctaagtaatactccaatttgcacagacacgtcttgttcttttaacccaaatcctacagctcccgtatccgctccgctgcagttatgtcccgggtctatgtatatctttgccattttcattcctcctatctattatattataacaaaaaaagattgtctttcagtgacatttcgtaatgctattttaacttgatttttaatatgtattcttatataatactatcaatcaggtaagaaaaaaatttgagggacgtttgtcatctccatctgctgtttctcacggctgaaatgaggtgtcgatgatatgaaaatacttattaaaagtaattgcttcaatcatcatttttattatcttactttttagagttaatacatctaaagcactttcttatatttatattattataaatataagagcatttgctaacatttgtatataaaacacccaaaatattcttaatttggaggaacatattatgagcgatgaattaaaaattaaaatgtacgcatttacagtagactgtaaggaaccttacgaattagcaaagttttatgcggatttgcttaagtgggaaatagtattcaatgacgatgactacgcttgcgtgggcgctcctggaacggaacaaggcgcgtatcccgggataacttttcaaaaaaataccgattatcaaccgcctgtatggccggcggaacctgacgcacagcagactatggcgcatttggatttcgctgttaatgatttggaaaagtctgttcaatatgcgattgattgcggagccacccccgcaagcaaacaattctctgatggctggagagttatgcttgatcctgaaggacacccgttttgcttatgccaaatgaagtcattaattgaaagcgccaattttgccttgctgtaaaatttacggtatagtaaaaactcttgagtataaataccaattttaatatgttgatataatatcagagagaagtatgaaattaatatattataaattctatcagtcggtactcttcttaattaattgggaagaaaccaattaaagatgttttataaataactcacggagtgttatataataaacaattctggtgttttataacctatatgttttttatataaaacatcgttttgattatgtaaaacatgagaatgcagtcaaaagtgcggtcaaggacaaatacttattttattttttgtataatgaaaaataagaaaagcccaattatgagcagaattcaaaaagttagacaaaaatctaataatttgaacgcgcttcatttttgggctttttctatattataaaaattaatttttccagcgttcaagtgtaggaagataggcttgtaactcttttcttgctgtgtcagcagtgaaatcttcccctgtttctttgttccattctttgagatatttaaggttgctttcaatcatttcatcaagagttatatcatttgtgaacgctccgttttgataacaataagtgcagtatttccgcgttatgcttccgtcagattcagttcccatttgttccggtgtttcaagcggcataccgcagctttgacatatcggaaattcattcatataaaactctccttttatatatacttatttattcagccggcactgcctggtatcttcccataaatagtatgtcgccgctctgattgtccattattataaacgtaaacggtttatctattgtgaagtcaaccggttcaggcggtagagcagaaccagccattcctattgaggtcacagctgcagcttcggttcccctttcatcaacatttataaacgtcttatgaattacttcattaacaaacacgttttcgcccaaaggcagattgataatcatgttcttaaagtcagctgtgttttggttaaacgccgtattgattcccagttgttttaacaagcagtcaccgtttgtactgccgattttctcatcatattctatcttaaatttcggtatagacagatttatataattagaactcagttttgacagataattatcataatcgatatttccgccgttatccatactgatatacatcgacgttttgtttcctttgtatggaagctccactatttgaacattttcgtcggcatatgtgtcataataacctctatcattcataaaatcagtctcggtccgcgtgccgtctgcattgttaaaaacagatttggctgtattctcagtcataaattcatactgccatggagctttaaagtatacggcatttatcagttctgccaaaaagccgctgtcttctattatagtgggtatttttccatttgtcttttctgacgtccagccgttaattctttcaacagcgtcatcgttgtttactgtttcagaagtgccgtaatagctgtcttttacaatggcttcaaagtcaggactaaacgccgcgtcgcttcctgcgtaataatctttattcagccatatagaatttgcaatattaaattcaacgctcttgccgtttcttaattcgttagaaagttttttgtattcttcaaattcagcgtcgctatagtcaccgttgtttaatttgtcagaaagctcattgtagcgtgcataatcaaaaccgccgctgtatttttcaatcaatgcttttgttgcggcattaaattcgtttaagtctttgatttttagagtgtcgagtatttcagcctttgtttcgccgtcagcgccattggcagccatagccaaagcggtttttaccgaaagcggcgaaaacatatagttcttgctcttgtccattttgctgttcatattgtaggcaaaagcattttgactttccgggtttgctgttggaaccggagcggatgaaaccaccgggtggttattaatattcccgtctataagcaagaggtacatcgtttcattgtttgtcagctttaatcccatagccaaatctattacaaccgacgcgtctcttcttgttatgaattgttcaggctcataatcaggaataaatgataaaagacctagttcataagcattcgtcaaatactcttcagaagttttagccgtgctgatatccagtccgtttttatagtctataagtttaacagtcgctgtgatataatcaataaactttactttttcggattggttaaaggtatttgtgtttgaggccaatatacccaattcatacaggtggttaacagcagtgtccgcatatgagccgttttgctctgcagccgtgtacggcttgtatccgtcggcgcgtgccaaaataactgccatttcgctgttgattaattcatcgaaaggtctgaacgtgcctgtgtcgtcgcccatgataatcccggaatctgttagtctttcaagagctgcattgagatttgtgtcaccgtaatcagcatcactgaaggttaaggcgaaagcggaaatatgtaatattgataacaaaaatattacggataatacagtagagataagttttttcatattatcactccttaaaatttggttatatattttagactcttataaatatattaggttcccgaaatatggaaaataagcaaactatttttgcccggttaattctttgatttttaatatctgtcctgagaacggcggcatatttactgaaatatttgtgtttctatcttcggttatttctgcctttatttcagtggttccggttttcatactgccgctgtaaatatcagcctcagtgtttattataagttcgaaacttatttcattttctatctcaaactcaaattcttcaacgggcacatcggaaaagttgagaaaaacaatatatctgccgtcttcgccacagcctcgttcgtatattgccagcgctctgtctttggttcccattttgtgccatgtgaaagacttgctgttatactcgccgttatagagcgcagaagtgtttacatatacacggctgatgtcgcgtatgtatcgcataaatgaatcatgaagaggatatttctttaaaaaccagtcctgttcgcgcttttcatcccattccctgaactgaccgatttcgtttcccataaaattcaatttctttcccgggtgggtgtacatatacatatacaaaagtcttgcctgaggaaatttttgttcataacttccccacattttttgaataattgtagcttttccgtgaacaacctcatcatgggacagaggaagcaaataaagctcattgtagaaatatgccatagagaatgtgagcttgtttatgctttttgttcggtataaaggcggaagtttaaaaaattccagggtgtcgttcatccagcccatgtcccatttgtagtcaaagccaagaccgtcatattcaacgggagcggtaactttaagataatttgtactgtcctcggcaatcagcattattcctttatgacgttttttgagtccctggttcatggtttgtataaattttatggcgcactcgttcacgccgcgtttcacatcgccgagccagaatattgctcttgataccgcgtccattctgagaccgtcaaaatggtattccttcagccagtaattggcggcggactggagaaaactccgaacctcgcccctgccaaagttgaaattataacttccccattcgctgcaacccacatggtcgctgggatattcatacaaggcttgtccgtcaaatttgccgagaccgtatccgtcaactgcaaaatggataggaacaaaatctaaaataactccgatatcgttattatgaaggtgatttatcatctgcatcagttccgcaggggagccgtatcttgatgtggggctgtaaaaacaggtgttttgataaccccaggattcatctgccgggtgttcggttattggcataagttccacatgtgtatatccgttttcttttaaatatggaaccagcatttctccggtttcagtatacgtgtaccatgaaccgtcctctttttgccgccatgaagcaagatgaagttcatatatattaaccgggttgttatagcccacgtcacgcttagccatccattcatcatcagtaaacttaaactcatccagttcacgtataatagatgctgaacccggtcttagctccatgccgaatccgtatggatcagaatgttcaacaaattcgtcaggagtggaatagacccggtatttatacatcatattgggttttacatcggcaaaagttccttcaaaaaaattactgtttttaggccttataaggtcgtattcgagccagccgttgaattctcctattagtgtcacacgcacggcacgaggagcatacactctgaatgtataccctgaatctgctttgtgtgcgcccaaatatgtataatcatcaaatgagttgccgtcataaaaatcttttaggttaaataattgattttccatatatgttatttatacagctatatgctgtatttcctcctctcgcttttaattattatataaaattattttaaattaagaaaagcggaagatactgtgtttccgcttttgtatgtataaaacatgttaaaaaaagataattttatttataaaaacgccataatagacatttgtctattatggctatattatagtatatatttatatatttttcaagcgacaatataaattatttgtatattatcgcaaaaactgatatatttattttcaaatttcctatatttataagttgttactaaagatatttaatacatcatgtccaatatccgattctctttgcatataaccccatataatatttattattttactttattgaaaaaactatttatatactttgtatgtgaccccatataaaaaattttattattacataataatggtgtttgaaccatttctttttatttgagtatacataataatgacattgcaggttatagcaaaatatgaccatatgtataacacacactttcaaagaaagtgtggtcacactcgcaagaaaaagaaacgcttcacctgtgaccacacctgcaaggtgtgtgtaatacaaagttacttgttttgaataacctacaatgtcaataatatgtatactcaaaaaaagaaaaagtgcttgctcgcttaggtcgcctgcggctccaaggggcgctcgcccccgctaatttcatcttgaatctgcgtttcaagatgaaaaagccttgttactttcccgttgactttgtgttctaccgtgaataaagataatccgagttcctattaatttattcattaaaaaagctaagttttcaatctagattaataaacaaaaaatcaggtttttttagtgaacatcggtaggcttgctgtgaccgcacctatatggtgcgtgtgaatcaaattaatttgttttgattaacctacaatgtcaataaattacttagttgtgatgtatgtcagcaagcgcgttaggtgagccatcatctgaacactcagtgttcaatatatcaagtaaatattcataaaaattaactttgtatataaccccatataatatttattatacttattttatctcctgttcgagtttatcaaatatttctgacgaaaaaaactcttccaaagtcatatctaatccatcacataactttttgattagaactatataaactttcctacgagttgtatcaaacatactataaacaacgacactttaacattttttattaaagtataaaaaataaattttattattaataaatataaatagtttagtttagtttagtttcgttttgtttagttttgtttagttttgtttatataatggtctactatttagattactatcttgattactatatgaccaactgtattgcatatttttaattaactttctgctcattctataatttgtctgatgaccctttaagcattatctatggaactgcgtcaaacgccaaactcatattatctccaattttaaagtaagccggttctgttattgttatattaatacaaactttaaaaagtttatataaataatttatatttgattcctattcaaaaacactttccggatacatttttatttcattagttctatttaatatgtaatcagttgaagtattgtaaaagtctgctagttttattaaaaagtgtaacggtatagtttgaaaacctcgctcataacgagagtatacagtttgttgtattcctaataaatcagcaatttccgtttgttttaacccagcatttatacgcagaaattttaatcttttcaaatacatttaaccacttcccttatattcttatttatcattttgtttatcttcatcaaaatagaaagaaggcaaattaagattaagcaagtcgccgggtttaacctccaaaatatctgctatattaaagaaaacttctaaagaaaatgaagaagttatattaggtgcttcaatagaacttaaatgtgaacggctaatatttgctttctctgcaagttcatgttgagtataacctttagcctttcttaaagctgaaatcatcaaccccagttcaacaaaacggtctctgttttcaaaacctgcttctttacgcattttatatcctcctagaaaataaatatatttgtagatattgaacactgcgtgttcagatgatagctcacctaacgcggcggctatgccgcgtttgagtattcatattattgacgtaaaagctatagtaaaataagtcactttgtatcacacccaccaaaggtggggtcacacctaccgatgttcaccaaaaaacctgcttttttgtgtaataatttaaactaaaaactttgttttttgataagtaaatcaattggaactcgaaatatctatacgcattttatatcctcctagaaaataaaaaaatatagtttgtatattgaacactgcgtgttcagatgatggctcacctaacgcgcttgctgtcgcaagcctaccgatgttcaccaaaaaacctgcttttttgtgtaataatttaaactaaatactttgttttttgataagtaaatcaattggaactcgaaatatctattttcacggcagtacacaaagtcaacgggaagttacagggcttttttcatcatgaagccatgcttcatggtgaaatgagcggggggcgagcgccccttggagccgtcaggcgacctaagcgagcagcactttttctttggtgaagcgtttctttttcttgcgagaaaaagaaatggttcaaacaccttattatgtaataataaattttttatatggggtcatatacatagtaaaattctaatatttcatattaacctagtcatataatcaaataatttattgaacttattatcatcattcaattttatatatctttatatttcgttatattaacttatatcaattttcttttagcaagtccatccaatataccttgaatataagaagctctacactcttcaaacattttcaatctattattttctataaattctataattttattacattcttcaacatttaacttttgtggatttgagcattccaatacttgacgtaaggtttcatttgtttgttttattttttcttcattatttattaagtcgctatattttttactttctttttggagtttatataaaattttatatatatattcatccaattcttcatcaaaaaaatccccgataaattcagttatatttatattatccattaaaaatcctcttttcttgtgctgacagtatttgtatttaagatatttatatatattctacaagatttataattttaatttttttacttctttttgcgtagttatagctttgtcttgctccgcctttatcatttcttacatacgcaaccataaaatcagattcatcaatcattatacggtttcttttttgtattgctgatttatagtatacctgttctaattcaggatatattatctcatcatattttttatgtagatattccatattattactcagatatttagtcatataaggaatatataaaaataatttaatatgagaatatgatttttttaattcgcctatagcagactcacacagtctgtcaaattcacccatacctccagaaataaacgtatcaacattacgatagttaattaaatattcaatagtttcaagtaacaatgcaacaattgaatttggtacttcccaatacctcccatgaccacaaaaacaacatttcatattatctctccttttaatatttggttacgcatttgcgtatattataacatagtttctaaaatcacgcaagtgcgtatacgcacaaatgaataaaattgtaaaatttatatgaggtgataatatgaatgcaaaagatgcagttgttaaaagattttgggaattatgtgaaaaagacaatataaaaaagaatgaattagcaagacgtgctggtatttctccttcttcagtatatagtttatttaatgataaacgtagagatgtatctattttaacaattaaaaaattgtgtgacggtttaggaatttctattaaaaaattttttgattctgatatttttgcaaatctcgaacaagaaattaaataattttttgcgccttacactcgcgtgcgtatacgccggtgaatataaaattttataattttattgaggtgatttttatgaaagttaaagatgcggtagttgagagatttaaagatatatgtgaatataaaaatttaaagccaaatgaacttgcaacaaaggcaggagttacgccttcgtcggtttatagtatgtttgacgaaactcgcaggaatgtttctatagtgttaattaagaagttatgtgatggtttggatatgactttggaggagttttttacatcagaaatatttaataaactcgaacaggagataaagtaaatatactatagtatgacccatataaaaaatatataagttgacataaaaaaagccggcttccaaaatggaagccggcaatatatccccttttattcctctatttgtcttacctcaacaatctctccgcctgtcgtcgtatacttcgactgcgcattaaccgttgagccagcgcctatatacctattctcgttcgtataaaaacctaagctgttatactttccgtcaacctgaatagtcacatatacatcatacttcttcggcacaataagacttttgtacgtgccgtcaactaaacttacttccataacggcgtcctcagagcgcacacccgttacctctcccatatattcctttgtgtcctggtcatatacaggtccgccttttttaaacgcgtcaatcgtaaaatccctaactccctttaccttgtatacatactctatcttcgccttctctgatgaagaaaccgcgtcgctgtttgaagtgaacttcgcataaataccaaaggcaagaacgataacgcacagaacaacgattatgtcaataatactgatttttccaaataattttccatcttttgcaaatgtactctttttcttcataatctctatcttcctttcctaaaatatttacactactcgcttacgttcagctgtgtgacaaaaccatatccagcccagccctttgaacgaaccgcgtctgaatctccaacccttatcggactgttgtttatgtttatctgcttcccggtgtctaccgcgtcagcttccatggttacataaatgtcatacttcccgggtatctcctgccactgtgccgttccctgattcaaatcatacgccaccgtttcagccggaacaattctcacatctgtaaccgtagccggcatcttttccttaacgccaacagtaaccttgtcgccgattttcggcatctcggtcaaatattcttccttgttggcaaattcaatttcaaacgttgctttaacatttccgcctgccgattttccgcttgttccgccgcccatagtggacaccaagtagtaagaaccgactgcaataatcgcggcaatgaccaaaataattataaagtctattgcgttaaactttgctttcatatctctttcctccaatatataatagttaattttatactgtttaattaagcaatttcaaatatatatcttcaatccttttggtgttcacctcagcggtaaaacactcgttatatatctctaaacttctcttgctcatactttcatacaaactctcgtccgtcatcagcttctgcaaagcgtcagccatagcggcagggtcctttataggaaccataaacccgttttcaccatcccgtataacaccgggattaccgccgaaatcagtaacaaccgccggctttcccaaactcattccctgaagcagtgaaagactggtagcctctgtaccgaatgaacaattagcctgaatatccatagcgttcatcaaaggctcaacatcatttaaaaatcccagcatcttgacagttccaatcaagccctcgtttttaatctgacgtttcagcgcctcagctgtatctcctgtaccggctatgagaaattttgctttaactccgcgctttttcaaaatctttgcggcttcaataaaatatctgtgccccttgacttcggtcagtctcgcaacaatcgcaaccgctttttcatccggctcaatcccaaattccgacctgactttttgtatatccgccgccggcttcaacgcttcaacgccgtttaatacaacgtctattttatcagcgctgacgcccgtggcggtcagattatcctttgccgcctcggcaacagctattatcctgtctgcggtatgattattaatccagccgtttaccgctttgccggggccctgagaaattttccttgacggctcaaacacgctgtgcctggtatagactgtttttatacggcactgtttagccgctatcctggcggacatacttgcgtgagtatgcacaatatcaggctttatttccttaaacaattttttcagacttccaatagccttcatatccagcgatttttcagccaggttgtccatttcataaaccttaacccccaaagcttccgcctccggcttcagcagtgagttcttaggcaggacaacagaaacatcaaactgttttctgtcaaaatatttgagaaaggttataatacattttccagctcccccgatattcgagtcagaggacacctctaccacttttatcactcttcctccaccgcctttactgctgattcctctttttcgcctttagcgatatacacggcggcgataccaagagcgagcactatccaaaatattaagaatacgcggtaattatagaagcagttatcaaacattccctgaacacagaacccggcaactcctgcgccgattgctacaatcattgcgcccagcttactgcctttgccggatgttgactgataaccgttaatcagcttcttaaagaacataacaatagtggttaagaaaacgcctatccccactatacctgactcgactaaaatctgcaggaacatattatgtgagtgaggagcaacgataccgctgtatgaatagaacggatataccgacttgaacgcctgagttccggggcctatgcccgaagcccaaaaatcttttaccattgccagcgagccataccaaatatatactctatacgaggttgacgaatctttcatatctcctacgctggcaattctgttaataatactttccggcaaaaccataggcaggaacggcaaagctatcagcgccaatccccaaatctttccgcatacaaacgtaacgaacagacctgcggttatcatgaaaccaatccagcatccgcgcgagaacgttaatatcagagttgcaaacataatgcctgccatggctatatataccagcttagcaagttttttcggcttctgccaaactaagcctatgcagaccggcagaaccaaaaggatatactcacccaaaacattcgggttttcaagagttgaataaactctcatttttatatcgctgaacatttcctcatcaacccatgcggcagacgtatcccagccgaaaatatactgggcaacgccataaaggcagaccaaggcgcctgacacagcaaacactgtcagcacgtcaaacaactgtttcctggtcttaacagtgtttataacaacaaaataaaacgccataaacaacaaataaattccaaaaatactcaaactgttaatcacagcaaaagaattcaggctggcaaacaaatatacagccaggaacccaagcatcagaaagcctacgccttcaaaacgccatttaaagtttcggtctgacacagccttaacaagaactgaaaacagacaaagtcccacaagaccaactatagccatagtaggcatgagcggcgcaagaaatacagtcagataaactccggcctgaaccgacctgagaatgagaaacacaacaaacaagcctccaagtataactattgtataaagcgggcttgtaaatccccctgcaactccggcggcaaatccaatcacggctgcaagccacaaacgtccgtttgactttgtaacgtccttttcaaaaatgtcatacttaaaatcaattccgctgagatgctcaattattctcattatccaggaacccgacaggaactcggttaaattagcattggcgacagacaaaacagctcctaatatcagcagtgcatataccagcagatttgtctgctctcctcctgctatcgcaggaacaacggctcccagtgttattccaaccagtaaaataccgatgaatctggtattaagcgccagaatattctttagataacaatcacaggctcttactatacagcttgtctctatcttatttttcagtttttcacaatactttctttgaagccaagcgaaaaacgtaaacggagacctcaaaatccttgccgcagcaccgttccctaaaacatccgaagaaaaatgctggttacgaaaaaagttggttattctgcttcttttccaagcgcccgaaataccgtcgtacactttacggaggattttataaacaaaactctgctttatgtaaccccaaatgaacaaccaaaaggattgaaaatatcccatttcattcatatcctattaccattcctttctttataaagtatttttattaaaacaaatccctctaatcatgttttcttccaaaaataaacttcattcctatcatcatctccgtcactttaagaatccgagccaagccaaaatatacaacacatgcaggcagtgaagcaacacacagtttaactaaagtcattaccatacctgttcccaatacgccgtcgacagcaaggaatacatatttggcagctataaacgcgagcacaccgcagatgaaagttttcagcaggtttagcataaaagcgcctgttatcacgccttcacgcctcttgtttatcattataagcaatgctgcggcgattgccgttgagcttatagcgctagccagggccagcccttctattcctatatcaaaaactagaacaaataaagcggcgcacccgatattgactacaaccccaaaaattgatgtgaacattggcgtctttccgtcctgaatggcgtaaaagctcttattcaaaacctcgcatatagagtaaccaaccattccgaatgagtaaaagaatagtgcagacgcagttataccagtagattcagcggtaaacgctccgcgctcaaatacgactttaattatagggcttgaaagtgcaagaaacaaagctgatactatagtgattataaaaactatccagccgaccgacgttcttgttgttgacgcaaaggcttcattattatcatcagcgttaagccttgataacttaggaaaaataaaattcgttatcgcgtatgcgaacactccaaccattataatatatatcttgtttgcccagtttagagcggacacagcgccgtttccgagacttgaaccaaacgacatatttataacgttgcaaagcggctgaacccaggagcttataagaaccggaagcgccaaaagcgctacctctttcatgctcccatctttaatattccaccgaggtttatacctatatccggtcttaatcagccatggaatttggaaaaacaattgaagagcccacgccgccagcattgatacagccactcccataagccccagcttgtccccaaatataagcagatatgctatcataacaccgtttgatacaacgcttatcaaggacggaatagtgaactcaccatgcgactgtaaaattccgacaaccacataggcaatagcagtgaaagctatagacggaaaaaggacacgaagcaatctggcagtttcttcaaccttacccgggacttcagcatagccgggcaccatcattttaactataggctgggcaaataccgaccccaaaattgcggcaagaactgcaacagcccccactatagtgataaaattattagcaaaagcgtcagcgccggattttcccaccttttctaaatttttgttataaatcggaacaaaggtggataaaattgccacgcccagcaccatatcaaaaaataaaagcggaatttgggtcgcgctgttgataacatcggaagcatagccctgaccataaatcccggcaataagcatctctctgaacagacccataaattttgcaagaagtataagcaccgccataatactgattgacttaactgcctttccgccgctttcgctcttcgtcatataaaattctccaattcaaattaatactaaaatataaacagtagacctaaatcagtctaccgtcatacattatataccagaatcgcctcaaagtcaatataacccagcacaaaaacacatactataaatacgttatgcttctatttactgagattattctgtttttattttgctgatttgttttattgaagtattttaaagagagactaaatttttaattgttatcagttataaaacaaatcaataacaaaaacattaagtttgatattatgagctttattgattattatattgttattattttaaagctttataacaaaaaacttttaattcattttttattttaagcctgttttaatttttttagtataatgaagtattaaaagtttaaaatccgactagactaaaatgagatttcaatagtaggttaaattagaattttatctgaacctgttaaacagaaaatataagaaactgtattacaattacaaactgtaatcaaaattctttaaagagaccaataaaaaagtcgtcaaaagttatagtaattgcacaaacaacattttatttttttcatccaaattgtttataatgttaatttataaaaaaaataaaattttttgaaaatttttcttgacaaattattatatagttgatataatatcaaagtcgcaaaaattgaacgcgggtgtagttcaatggtagaatctcagccttccaagctgattgcgtgggttcgattcccatcacccgctccacctttataaccgcttccacaatcaagcggttataacaattttatgcgcctgtagctcagctggatagagcaactgccttctaagcagtgggccaggggttcaagtcccttcaggcgcgccagctttttatttaaatatggtgggtatagctcagttggctagagcgctagattgtggctctagaggtcaagggttcaattccctttacccaccccaaatactgggccgtcgtcaagcggtaagacacagcactttgactgctgcattcgtaggttcgaatcctgccggcccagccattaaaaaactaaatatgactcattagctcagttggcagagcacttgacttttaatcaaggtgtccggagttcgaatctccgatgggtcaccaaatcaagcaacagtcgaacaattattttttattaatatgaaattattatgtcaaataatatgtatgttaaaaaaataattagttcctgagacacgtattatacgtgtctctttttttgtgtttaaaatataaaaactaatctactgtagacataattagattaatatgctatattttatatgtcctaaataataatttttatatataaaatttatacacagtctcaatgattaaccccatattattactatatatgcaatcaaaaaattaagttttatttgaataatattaatattgcttttatatttttactgattgtttttaattatctatattatttttaataaacatatgctctttgattattttgcctaatatgtatttttcaaataaattataaaaatttttatcttcgaatgcttattatacatatgattttgccaaacgtaacgcgatgagcaacatatttacaatttttaatattaatttcgatagtatctctcactttgttgctaatgtcatttacataatattcatcagccaacatactggcaaataatcttgaaagttgtctgcatagcttacttttgttgaatatcccgtcaaaagtatcaatatcattatttaattatataaattacacacctttactcaagaaaaatgttgaataaaataactgaccaacctatatataagcatacacgattttagtcacccgtatgtcaagctcacgacaaaaaaatttgcaactttttttgaaaatttccgggcaaccgcatagctgcccgtagctgttccatacggcgttcatggctcatgcctcctttcacggttccgcagttgctaagaagtcctgcgtaacatattcaatctcaatccggtctcccggaaagatatagaccttattgataagccggtcaatcagggcttgcgtcagagtgccggcactgtctacttcctgaacgatttcacgctgtttcagtcttgcttcgtaatcgctttgtatctgtttggtctgtgcggtaatagcggcatggacattctttgcctgcaccagttccgcgtcatataccgctttccgctccctgtaggtttccaggtcaatctctccaagcgcatactgttcatagagctgccgtttactgtcctggatagagtgcagcttatcttcatgctcggcctgctgaaccgtctgcaaatccagcttgtctttgctgctgtcaattcccagcgccggacacatctgcgcccggattatctcaaaaaccgcctgctccagatcaaccatttttacccttaccccgtgacaaggaagattttctgccacttcggaatgacggcagtaaaaccagacatcatttctgagtgacatggcatggtcgcaacatccacagaatacctttccacggagaaggtagtcacgctgctttttattgggaagggagaaccgcttaattgaagcattggctttctcaaacagttccttgcttacgattgcctggtggtgatccgggattttgaaccactcgctttcatccttcaatttcatgcggcggctgccaatctcctgtaccttgcgcttaccgatcacataggtgccgatataccgttggtccgccagcatccgcagcaccgttgaactgttccagacgccatgcgttcgggaaacattgtagtgatctttgcctttattcctccggtattctccaggcgtaggaatcttcatggcgtacagtttcctcgtgatctctgcggcggtattgccgtcggctgcccattcaaatatctgccggacaatttctgacacttcctcgtccggttccatacgcccgtctgcgctcttacggtagccataaggacaaatgacgctttgatactcgccccggcgcatctttgcgtatttggcgcttttcgttttcatggacatatcccggctgtaacactcactgataagatacttaaaggcaatgtcaatccctccggtatctcctttgaaattggcggtatcaaaatcgtcgctgacagaaataaaccgggtatggtaaagcggaaacactcgctcaatgaaatagccggtctcaatgctgttgcggccaaaccgtgaaaggtccttcacaatgatacagtcaattttcccggcctgcaccattgtcaaaagctcctgtaccgcgggacgttcaaagttggttcctgtatggccgttatcaacaaattccaggacttcgctgttatcccattcctgcagcgacatggccttttccagaaggagcagcttttggttgggaatactcaaactttccgtcttgaagtcctccacagacaggcggatataaagggcaatcacatatttctgcttcattttaccgcctccccctgaaattcactcttaaaccggaaaaaaacacggatattccgctcatggtcgatctcaatccgctcaatcagccgttcaatcagttccgccgtcaatacatggtcctgagccagtgattttgcgtctttttccattgcacggtagcgtacaagctggtcatccagggcatccatatctttttcaagcgcctcaatatcgccggaaaggacagtgatagattcctcataacctgctttcagttcaaaatattcatcgctggttaaaatgccctgtacgaagttttcatacagcccccggattaaacgccgctgtttctctatttcctgccgtttggcagacatttgggatttcagcccgtcttttttctgtttctgccttgcctccaactgaaagagaggaagggacatacccaaagcaacggacagctctttttctaaaatagtggtgacggttgcaatcagctctgtctcctgcatcatcacgcctttgcaggtatctttcgccacacggctgttcgtgaggcaatggaaccagtaaatatccgggccttttttacgttccgcccgttgccggtggaggctcctgccacagtcggcgcagaataccttacccttgaaaatattcggggtataggggcgtttggggaccgcccggctttcctcgcagacctgtttccggtattcctgtaccgcagtaaagagttcatggctgataatcggctcatgggtgcgtctggcaataatcaggttgtcatcgtcagccttgacctgctggtggtccaccatctttgttttgccctgcaccagatcgccggtataaacttcgctttctaaaatcttcattaccgtgcgggtctgccatttgccgctcccaatcaggccggggctggtgatttcaccggtggattttttgtagtggcttggcgccgcaatccccatttcattgaggttacggacgatacggttcaacgctacgcgctcataagcccattcaaaaatctgtttcacgacaggagccgtattctcatcgatcagcagcttgtggcagttatccgggtctttccggtagccatagggtgcccgtgcgccaatataatcgccgtctttcatggcctgtcttgcctgtgccttgatctttcttccaatatccagagaataggcttcatttatcatattcttcaggggaagcataatgccgccgtgaaggttgccggggtccgccgtgtcaaactggtccgtgaccgcaataaaacggacattatgcgcataaaaatactgctcaatataatagccggtatcaatagaattgcgtccaagccgggaaaggtctttaacgatcacacagttgatatggcccgcttcaatatcagagagcatctgctgaaatccggggcggtggaaatttgtacccgtcagtccattgtcgatgtatgtgtcatagactacaaaatccggtttgtccgccagaaaatcattcagcaccagcttttggttctccacggagcagccccgtttcttgttatcctccacggaaagccggatatacagtgccacatatacatataaggacggcgccggcatgggagattccgtctgtttcctgctttttcttgccatttagcctgccttcctttctgcggcctgttccgcgatttgctccgccagtgcgacggcctttttatattcatcctgatagttaaattcaatatgcagctcgtccttgccgattacccggatactgcggataagctgcatgaccgcacggcggtcaatttcttccattgtggagaactgcatgaaatggttgatccagcggttccgctcgctgcggttctccagtacatccgtcaggcgttcttcccattcgtcaatcgccttttgcagaagttcaatgtcggcattgtatttccgcttataggaaagatattcttctttggtgagaatcccgcttaccaggttctcatagagctttgtcttgaatccctcgatctgcgcccgctgcctttcgtttgccttgatctgcgcggtatattcctgaaccagttcccggttgatccgctcctgactaatactggacagcagagcatccagggaagctacattttcaatatggcctttcaagctgtcctgcacacactcgatcaagtctgtttcctttaacatgacagaggaagtacagccatttttctttccggtcgggcaatagtagtagtggtattccttgtccttgtaacggttcgtcttgcgggtcatgcggcaaccgcagcacccgcagattaaaatgccggagaacaggtagaccttatctgactttggagaggtgcgggtatcaatccttcggagcctctgcaccagatcaaaatcatgtttctggataattgcctcgtgggtatcctccacacggacccattcggaggaaggcttgtcctcacgctctttcagcttgaagtggggcgtcgtctgctttccctgtaccagcgttccggtgtaggtttcatcctgcaaaatacggataatggtagtcgcagaccatttacagtccttgcgatccgtatagccgccttttgcatggggcatcccgtgattgcgtttatatgccagtggggaaagtatgcccatccggttcagttcatccgcaatatgggaagcgctaaacccttccagacgctttctgaaaatatcccgcaccacacccgccgcatattcgtcaacttccagacttttatgcttatcgccggtttttacataaccgtaaatggtaaaggctccgacaaaatcaccgctgcggcgtttcacatccagggcgctccgggtctttacagaaatatcccggctgtatgcctcattcataatatttttgacagagacggtaaggtcatcggcagcatcggtttccgtgtccacgttatcattgatggcgataaaacggacgccgtaagccgggaacacccggcgcatataacggccagtttctatgtattcgcgtcccaggcgggaaaggtcttttacaattacgcagttggcctcgccctgctcgatcatccgcatcatttcctggaaggccggacggtcaaaagctgacgttagataacgatacttttgaaaacactggaaaatcaaggtttttcgagcgacggacaagcagggtattgtactaaaaactgaatacgacgcagaagcggcgtttcttactctctacatgggagaacaggaacgccgcttttttcatgccctttgttacgcagtaggggcagaaaaagccttgctacaagcggttttccgggcgcgtatctggcgcggaaagggatttataccttatcccccgaaaccgcgcttctactgcgtaacaaatccaaagcaaaggagctatgaactatggcagttttcagagtggaacgaaacaagggctataccgtaatgagcaaccaccacctacgcaacaaggagctttccctaaaggcaaaggggctgttgtcgcaaatgctgtcactccccgaagattgggactacaccttgaaaggcttatcccttatcaaccgggagaagatagacgctatccgcgaagccattaaggaacttgaacgcgccgggtatatcgtccgttcaagggagcgcgacgagaaaggacgcttgcggggcgcggactatgtgatattcgagcagccgcagccgcctacgccggatttacctacattggaaaatccaacattggataatccaatgcaggaaaaaccaacattggaaaaacctacgttggaaaatccaacgcaattaaataaagatatacaaagaactgacttaccaaaaaaagaaaaatcaaatacagatttatcaagtacccattccattcctatcctttcccctaacccctctccttgcagagaagcggctgcgccgccggaacggaaaggaacggaagcggcagcacagagcgcagttgatatataccgggaaatcatcaaggacaatatcgactaccacattctcaaacaggacatgaagtttgacagtgacaggctggacgagattgtagacctcatgcttgaaaccgtatgcaccgccagaaagcgggtacggattgcgggggacgactacccggcagagcttgtgaagtcaaagtttatgaaactagacggcgagcatatccgctttgtgcttgactgtatgcgggagaacacaaccaaaatccgcaacatcaagcaatatctgaaagccgcccttttcaacgccccgtccacaatcggcaactactacacttcccttgtcgcccatgacatggcaagcggcgcactgtcaccgaaaaagccgcagtacggcgacccggactattattcatgcaatgagggcgaaagcctgtaaccacccacaaccacaaaaggaggattttattatggcacagaaaatgacaggagcattggtatttgacgagcgcaccgaccgttacgacatccgctttgacttaaacagctactacgggggcttgcattgcggcgagtgctttgacgtattcgtgcggggcaagtggaagccgacccggattgagtacggcgacaactggtatcttgtgggtatcagagccgaggacttgaacgggctgcgggtgcgtatctgaccgccgccccataaagaaacgcgaaaggaggacgcgacaaattgcaggacgaagtaaacgaaaagaccatagccctttacatcaagaccgggaagctgaccgcgcagacgctccaaaaggcaatgaaagccatactgtcaaagggcaaaaagcagcttgcaaaaccgccacagggcaagcagagcttaaagcagcttatgaagcagaacgcgggcgtttccaacattgagattaccgagggcaatatcaaagcctttgagagtacggcgaaaaagtacggtatcgactttgcgctgaaaaaggacgcgacggaaagcccgccccgctatctggttttcttcaaggggcgggacgcggacgtactgaccgcagcctttaaggaattttccgcaaaaaagctgacacaggagaaaaagccctcaatccgaaagctgctctctaccctcaaagaagctgcacagggcagaaacgcggaacgggcaaaggtcaagaacaaggacagggaggtatcgctatgaagccggaaatcaagaagctgcttatcctaaatctcccgtatctgctctttgtctggctctttgataaagtgggcgcggctgtccggctctcccccggcgcggacgcaagcgcaaagctgctacatcttggggacggttttaccgccgccttttccagtatcgcgccgagcttccacccggcagacttagctttaggcattgcgggggcggtcattgtccggctgattatctacaccaaaggcaagaacgcgaagaaataccgccgcgggacagaatacggttcggcgcgttggggcggggctgacgacataaagccgtacaccgacccggtatttgagaacaatatccccttaacgcagacggaacggctcaccatgaacagccgcccgaagcagccgaaatacgcaagaaacaaaaatatccttgtaatcggcggttccggcagcggcaagacccggttctttgtgaaaccgtcgctcatgcaatgtacgtcaaaggattttccaacgtcgtatatcgtcactgacccgaaaggaacactgattttggaaaccgggaaaatgttacagcggtacaaataccgtatcaaagtgctaaatacgattaacttcaaaaaatccatgaaatacaatccctttgcctatctgcggagcgaaaaggacattttgaagttagtcaataccattatcgccaacaccaaaggcgacggggaaaaatccggcgaggatttctgggtgaaagcggaaaagctctactacaccgcgctaatcggctacatctggtatgaagccccggaggacgagaagaacttcacgacgctgcttgagatgataaatgcgtcggaagcccgcgaggacgacgaggatttccagaacccggttgacctcatgtttgaacgtctggaagaaaaagacccggaacattttgcagtcaagcagtacaaaaaatacaaacttgcggcgggcaagaccgcaaaaagcatacttatctcatgcggcgcgaggttagccccattcgacattaaggagctgcgggagcttatggaaaccgacgaaatggagcttgacaccataggcgacagaaagaccgcccttttcgtcatcatcagcgacaccgacgacacttttaactttgtcgtttcaatcctttacacacagctattcaacttgctttgtgacaaggcagatgatgaatacggcgggcggcttcccgtccatgttaggtgcttacttgatgaatttgcgaatatcgggcagataccaaagtttgaaaagctcattgcaacgatacggagccgggaaatatccgcgtcaatcatcttgcagagccagtcacagctaaaagccatttacaaagacaacgccgataccatagtcggcaactgcgacaccacgcttttcttgggcggcaaggagaaaaccacccttaaagaaatatcggaaattttaggaaaagaaacgatagacagctttaacacgtccgaaacaagggggcgggagctttcgcatgggctgaactatcagaaattgggaaagcagcttatgacggaagatgaaattgcagtcatggacggagggaaatgtatcttgcagctacgcggggtgcgcccgttcttttcggacaaattcgacataacgaagcacccgaaatacaagtacctgtccgacgcagacccgaagaacgcctttgacatggaaaagcaccttaaacgccgccccgccattgtcaagcccgacgaggtttttgactattacgagcttgacgcggcagacttacaggaggacgcagaccatgaggaaacgtagcgcagaggaaaaacaaaagcagcttgaacggtttttaatgaatgttgcggaagccgccgacgctgcattatgggagtattggcgggaaaaggaagcggaacaccgccgttttgcaacggagtatgtcacgcgccgggggcttatcccgcaacagtgacagcatggcagaccgccgggggacaggggaagctacacttcccctacgctgccttgcggcagctacccctttgtgaacttgcgggaagcgaacaccttgctacgcaagctattcacttcccgcaagtctgaaaaaaacgtccggcagcacagcggaacacagaaaggagcgattgaagcaatcacatctatccataccggctacatgatacgcgcccccactttccggcgcagtacacagcggcaggagccgcaccccttacaactgaataccgccgcgccgcagaacttacgcagcgcggggacagccgcctttaccagagggcggtttttttgtgcggcggcgaccatacgctgaccgccttttgtccgcttgccggacagccgcagacgcggcagaaaggatatatttatggcatttttcaatagcgcagtagacgttttgcagacccttgttgtagcacttggagccgggcttggtatctggggcgtaatcaatctgatggagggctacggcaatgacaatccgggcgcaaagagccagggcatgaagcagttcatggctaattaaaggtaacaaaaagaaaggaaaagcacaatccagacggtatcagcggcaggctacaagaataaattgtgatttcacaagattggtgttataataagagaaaagttcctgccggggcagccgccccggtggtatggatagaaaggcaggaaaaatatgcacatcagctataaaccactctggcacacactgttagagcgtgatatgaggaaagaggatttaaggcttgccgctggtatgacaacgaatatgattgccaacatgagtaaagagggaaagcacatcagcatggacacattagcccgtatctgcgaaacgctgaattgtgagattactgatgtaattgagttagtaccagacgagcctgcttccacaggaggtaaggaacatgagcgaattaaaaccaagaataacggaaaacggaattgattatatccttgttggagattactacatcccagacttgaagctgccggaggaacaccgccccatcggaaagtatggacggatgcaccgggaatatttaagagaagtccacccagcccgattgaacacattgacactgaccggggagttatggacatatcttgcagacctgaacgaacaggcacaggaacggttagacaccatcatagagcagatgaaagctgccgagggcgtgaccgaggaattgaagcgtacctgtcaaatggaatgggtgcagcgttgcaataacattcacaaccgggcagaagaaattgttttgcatgagatgatttattcataacggtatggatagagtgattttttattcaatcgaaagttagtgaggtgttgaatcatgaatgaaagagaaaaaattattcaattgtggtttgaaatgtggcttacaaaacaggatttaggtattgataatatttttacggaagatgtaatttatactgaaagttggagtcctcaatataataatcgtcaaatcgtaaaacactggtttcaggaatggaatacccgtggcaaagtcgttgtttgggaaattaaacaattcttccacaaggaaaatactacgattgtagaatggtatttcaaaaatgaaatgaacaatgggaatatagaggaatttgatgggatttctctggttgaatggacaaaggatgataaaataaagtcattgaaagagtttggttgtaatttgaataattataatccttatgagcatagcgaccaacccgaatttagggaagaaagaccaagttggttttaatattaaatctataaccgaaagctacagtttaccgaactaaacttttaactgaataaccacagaacaaaccgctgttacatggaagtcaacaaaccatgcaacagcggtttttctttatcgttttttcctctggctgataggcgttcccattttctttgactttttgagaatccgaatcagccagcgaaattcttcatctgacagatttttatagttgatgccgagctgtttgcagtaaaggacaaccagcttttcatcccggctgcccttgaaattttcgaccgcttccagattttctttcagttcatcggcaacggtggtctggggcgcactctcactgtcctttttatgggcttcccgaatatcccggataatgaggttgaggtcatccagaaccatgtggctgaaatattcatcatcactgatatgggcggcttgcaacactttcaaatgggggtcatcttcgccggggcgataccgttcaatgatttcatgccggacggtatcgacaagggcgttcaggttttgaatctgcatggtggcaatcccatccacataaatctcaatgtccgcaagaaacttgataaagtccttatgggtggcaagttcgcagagcagacggttgttaatccgaccgcttttcagaagtgctaccatctcatcactcaaatgcagctcccttaatggcgtgttgatctccgcccggttctctgtccggcaaaagagataatcgagggacaccccataaaaatctgccagcaggataaggttgccatgattgatttccttatagtcatctttttcataactgccaagagccgattttgaaatacccgtttgctcagccagttcttccagttttaatcctttgtttaatcgtaaatcttttagccgttcctgtattgtagtagctccgttcattgaagcagttccccctttctaacgacatttataaccgttgaattgattatatcatatcaattccgcaatcgtggaaatttctgatttttacccctaattcctactttgtggacatacggcacagggcacaaaaatgttctatgatacaggtagttcatcgatggattattccaatcgaatgaccagcctgtgtgggatatgcttccccggcgatgtagcgccacgacttttggcagggatatggaggaaacctgaccaaaacgagcgtaccaaagggagcgatacgccgctgtgagattcaggggaggaacgacaccggggagaactggcgaactgacaccgaaatgataccgaaacacgacaatctgatagggggacagtctaccctatcgctgatacttcgggagattttaggcggctctatggctgtaattttgccgaaaatcgacccgaaaccatacactaaaacgggaggaagcgcaatatgccgagaatgagcaaaaagaggaagcatgagctttccttttacctcaatgaccgggggcgtgtcacttacaacgaattatgccggaaatgccagcatgggtgcaagcagagcttccgggcggttgtgattgactgcccccgttatttatccaaacgagcaaagaaaaaggaggaacacaccgaatgaattttgaatttatgacgatagacacacccttgccaccctgtatgccatttcccagagcattgacaggatttccagtcagtagcaccgcaaaggtcatgtactgccggatgttggacgctatgctctccaaagggcaggaggacgaaaacggaatcctgtttgtctgcttccctgttacagccattgccgcagtcctgtcccgcagccccatgacagtcaagcgttctctgaatgaactggaagccgccggactgatcatgcgggtgcgtcagggcgttggagaatcaaacaggatttatgtgctgataccgggaaaggaggacgctgcccttgcctgatacctcaaagctggaaaagctaaaccgggagctggagaaaagcgaaaagaaactgcggaaagccatcaatgatgaaaaggcattgcagcaccagttaaagcagcttaccagaaaggaacggacgcaccggctctgtactcgtggcggtatgctggaaagttttctgcaagagccggaacgcctgacagatgatgatgtcatgctgttgttgaaactcatttttcacaggcaggacacgcaggaactattgaaaaaactgctggaacggaagaagcctgaaaccccttagtttactaagggcgcaattatacaccacccagaagttggtgcattgcgttctccgaaggctcctcgccggagggctgtgattttccgcattcatggtctgctccaaatcatacaggggacgctacgcttcccctgcgctggctgccgccagctacccttttgtgtacttgccatctggggacaccttgcgctgcaagctgttcccatctgacaagtttcataaaatacgctatcttttcgataggtaataaagtataatgaagtcagcaataaatcattatttgaggaactgggcggcaaatacgaaaggcaaggggattatttgataccgtgcttaactgtacccgccgaagaagaacaggcaataggcatctgggggcaacggcatttagattatctaaaacagtaccgtaaagttacatacaccaatcttcttacaagcggcaggctaaacgcctaccttgccgacatcaacagacaggcacaggaacgctttgaaaggctcatagagggtatgaaacaggcacagggcataacggaacagctaaaggcagaaaacgccttagaatggacaggatgcctcaataacataagggcttgtgcgagggagattgtggaaaaggaaattatttttgcataaacagatgattagtggcagggggaaatcctgccgctttttctgctttagtttgtcagcttgacaaataaagggttaaggagtataattagattcagtattatacaaggagttaataaatatgcggcaaggtattcttaaataaactgtcaatttgatagtgggaacaaaaagtagcagtcccgtttcacttttaatatggggcttagttttttgtacccagtttaagaatacttttatcatgtaattttatatgcccgaaaacatataagtgttttggggctattggagttatttacccagtgataggagtatttatcactgggtatttttatgcccttttttgggtgttgataggaggaaaatcacatgaaaataattaacttaggcattctggctcacgttgacgcaggaaagacaacattaacggaaagtttattgtataccagtggtgcaattgcagaactagggagcgtagatgaaggcacaacaaggacagatacaatgaatttggagcgtcaaaggggaatcactatccagacagcagtgacatcttttcagtgggaggatgtaaaagtcaacattatagatacgccaggccatatggattttttggcggaagtataccgttctttatccgtattagacggagcagtattattagtttctgcaaaggatggcatacaggcacagacccgcatactgtttcatgcactacagacaatgaagattccgacaatttttttcatcaataaaattgaccaagaggggattgatttgccaatggtatatcgggaaatgaaagcaaagctttcttcggaaattatagtaaagcaaaaggttgggcagcatccccatataaatgtaacggacaatgacgatatggaacagtgggatgcggtaattatgggaaacgatgaactattagagaaatatatgtcagggaaaccgtttaaaatgtcagaactggaacaggaagaaaacaggagattccaaaacggaacgttatttcccgtttatcacggaagcgctaaaaacaatctggggattcggaagcttatagaagtgattgccagtaagttttattcatcaacgcctgaaggtcaatctgaactatgcgggcaggtttttaagattgaatattcagagaaaaggcggcgttttgtttatgtgcgtatatatagcggaacattgcatttgagggatgttattagaatatctgaaaaagagaaaataaaaatcacagagatgtgtgttccgataaacggggaattatgttcatccgatatagcctgctctggtgatattgtaattttaccaaatgatgttttgcagctaaacagtattttggggaacgaaatgctgttgccgcagagaacatttattgaaaatcctctccctatgctccaaacaacgattgcagcaaagaaatctgaacagcgggaaatattgcttggggcacttacagaaatttcagatggcgaccctcttttaaaatattatgtggatactacaacgcatgagattatactttcttttttggggaaagtgcagatggaagtcatttgtgccatccttgaggaaaaatatcatgtggaggcagaaataaaagagcctactgttatatatatggaaagaccgcttagaaaagcagaatataccatccacatagaagtcccgccaaatcctttctgggcttctgtcgggttgtccatagagccgctccctattggaagcggagtgcagtatgaaagcagagtttcacttggatatttaaaccaatcgttccaaaatgcggttatggagggggttctttatggctgcgagcaggggctgtatggatggaaagtgacagactgtaaaatctgttttgaatatggattgtattatagtcctgtaagtacccccgcagactttcggctgctttcccctatcgtattggagcaggctttaaaaaaagcagggacagaactattagagccatatctccactttgaaatttatgcaccgcaggaatatctctcacgggcgtatcatgatgctccaaggtattgtgcagatattgtaagtactcagataaagaatgacgaggtcattctgaaaggagaaatccctgctagatgtattcaagaatacaggaacgatttaacttatttcacaaatgggcagggagtctgcttgacagagttaaaaggataccagccagctattggtaaatttatttgccaaccccgccgcccgaatagccgtatagataaggttcggcatatgttccacaagttagcttaacagcttgcaaaagtcatataaaatgagatttgaaaggattagagactaattatgatgaaatgtaacttcatgtttgctaaaaattcaaaggcatattctgtctacctgctgttccgatttgtctgttccctggcggtttctatgtccacagtgctttccatcgtgtaccacctggaggtggtgcagctggatgctttccagcttgtcctggtagggacggttcaggagacctcctgctttctgttcgagatgcccaccggtgtggtggcggatttgtatagccgtcggcgctcggtgctgattggaatgttcctctacggcctgggctttctgatggagggtgcgctaccgtggttcgcgccggttctgctggcccaggttgtctggggttgcggtgataccttcatcaccggcgctctggaggcgtggattgcctcggaggaagaggacaaacccatagacaaggtgttcctgcggggcagtcaaatggggcaaatcggcggcgttctgggcgtggcgctgggcacactgctgggaaacataaacctgcaaatgcctgtcatcttggggggcagtttgtgcttgttgttggggctggtgatggttcgcatcatgccagaaaccaacttctcccctgctattgaggaacggcagggcttgcttaaagactttgtctgcctgttcaagctcaacctgggctttgtgaaaggcgcacctgtgttgctggcgctcttagcaatcacactatgcgggggacttgccagtgaaggctttgaccggctctccaccgctcattttctggatgacacggtaatacccgttatcgggccgctgaacagcgtcacttggttcggtgttatcagtcttatcggcagcggcttaggtattctggcttctcagttgctcatcgcccgcatggagaaaaaagggactgtcagccgaaccagtgtggtcatgtccaccagcgccgggtatatcctgttcctggttctcttcgcggtggggcggagcttttggttcatgttgttggtgttcctgctggcggggcttatgcgcaccatcaaggagcctgtgctggccgcctggatgaacgaccatgtggatgagaaaatgcgcgccacagtcttttccaccagcggacagctggactctttcgggcagatcatcggcgggcctattgtggggctggtagcccagcaggtgtccataccctgggggctggtctgtaccgctttcctgctgttgcccgcgctgttcttagtgccggtggcgggaaagaagcgggattgatatggcatagttaagtttactgacgagcgggagattacttccgctcgtcttcatttagtagcgcaaaatttgaggactctttatttccttattcggtatagcggaggcggctgtcaattcgacataattttcttgtgatactttaccgtacatgagcattaggaataggaatgtatctttgtgtggtagttgttacttgcacaggtattattgtttcaaaaatcagttccaagccaaatgaagatactcctgaagaaaaagaagaatgaccaattccaacttgtagaactgaaaaattgaaatttgatgggatggtgatattatgaaaaagataatggcagttatgctatcgttgcttgcttgtacggttctgcttgcagggtgcaacacttcctccgaaagcaatgaagaacagtccttaaaggtatattcatttagcggagaaaatgaatatatttctgtgtcgaatggtgtaattattttagatggcaaagatgaaatttgctatggtggtgatttgaaagtgatgtcagacgattttgctaatattaccacatactcaacgaccatttatatcaatggaagcgaaaaagaaactctgctttctaatggtgttgatgatcagacaggtgagacaatagatgtttctggaaatgttggacaaatttctggtgacattctcagagatagtgacgctgataagttgactgataatttgtggtttgaattgaaaacaaccaatttgaacggagaagaaagcacttatcgggtacagttagagacaactgaaatcacaaaggaagtcaaaaagtaaccccaaactcttacaactaaatacccgccgcccacacagcggcacaccaagcaggaaatctgaaaaaggttgcctgctttttttctgcccaaaatgaggtggcaaaacgccaccccatccaccaattactgaaaggagggacacgaaatgccctgtccacacaatgaaatcacgattgtgcagcgcagccagcggcagtctgcggttgccgccgctgcttaccagagtggtgaaaagctgttctgtgaatacgaccagcaagtgaagcactacccggaaaagcgtggtatcgtccacaatgaaatcctgctcccggcaaatgccccgccggagtatgcagaccgcaataccttatggaacgccgccgaagcggtggagaagcaatggaactcccagcttgcaaggcggtgggtgcttaccattcccagagagataccgcccgaccaatatgctgtccttgtccgggagttttgtgagcagcagtttgtttccaaaggtatgattgctgactttgccatccatgacccccgtccgccgggacacaatccccacgcccatgtcttactcactatgagggcaatggacgaacatgggaaatggcttcccaagagccgcaaggtttatgactttgacgaaaacggggaacggataaagctactatccggcaggtggaaaagccacaaggaggatacggttgactggaacgaccagaagtattgtgaaatctggcggcatgaatgggaggtcatccagaaccgctatctggaagccaatgaccgcccggagcgtgtggacttgcgttcctatgccagacaggggcttgatattatccctactgtccatgagggagttgctgtccggcagatggaaaagcgtggtattcagacgaatatcggcagcctgaaccgggaaatcagagccgccaacagtctgatgaagtccatccggcagcttatccaaaacctcaaaggctggattaccgagctgggagaaaaacggaaagagctgcttgcacaaaaagcggcggaggaagcgacacttcttccccatctgctgatgaagtacatggagatacgaaaggaagaacggaaggactggacgagggctggacagaaccgggggacttcacaggacttaaaggcagtcagcgaagccctgtcctatctccggcaaaaggggctttccactgtggaggacttagaagcatttctggaatcttctgggaaatcagccgccgattaccgcaatcagatgaagccaaaggaagcccgcagcaaagtgattgacgggattcttgccagccggacagactgcaaggaatgtaagcttgtctatgagaagtaccagaagatatttttcaagaaaacaaaggagaaattcaaacaggaacacccggaggttgcccggtatgagaaagccgccgcctaccttgccaagcacccggacgataaggacagcacccaaaaggagctgcaacaggagcaggaaaaacttctcagcgaaatcgcagagctgaaagtaccgctgaccgaggtgcaggaggatttgaagaagctgcgggacatccgctactgggtacggaaagccacccccggcacagaggaaagcaaagagccgcccaagaaacagcctatcaaagaagtcttgcaggataagactgacgagaaaaaagcacaaagaaccaccccggcacaggagaaacacagacaacaggatatggaactttaacaggcacttgccattttcaatcagagaatgtcaggtgcttttcttattttcaaggagggatagatttgaatgtatttgaagctgtgaagcagtccgtcacaacaagacaggctgcggagcattatggaatccgtataggtcggaacgggatggcttgctgcccgttccatcatgataaaaccccaagcatgaagctggatcggcgttaccactgcttcggctgcggtgcggatggggatgtgattgattttgccgccgccctgtatgggctgggaaagaaagacgccgccgtacaactggcacaggacttcgggctttcctatgaggactggaaaccgccgggaaaggcgaaaaagcccaagccccggcagaaatccccggaggaacagtttcaggaagcaaagaactgctgcttccgtattcttgccgattatctccacctacttcgagtgtggagaaaggaatatgccccgcactccccggaggaagccttttatccccggtttgtggaagccttacagaagcaagcccatgtggaatatctgctggatgtgctgctgttcggggagacagaggaaaaagcggctttgattacggactacggaaaggatgtgatacagcttgaacagcgaatggcagagcttgcagccgcagacgcagcaagaactaaaaaacaccatgaacgccatgcaaccgccccagagcattgaggaaatcaaggcggggctggaaaccaccgagaaaggcggtgtccgtcagagcatacggaactgcctgaccgtattccagcgtgacccgctgctttccggggctatcgcatacaacatcctgaccgaccgcaaggacatcataaagcccatcggcttccacagggacagcaccgccttaaacgatacggacatgaaatatctgcttctctatctggaagaaacctacgggcttaccaatgagaaaaagattgataacgccatcgggattgtggcgaatgaaaacaagtaccaccccatccgggattatttaagttcccttgtgtgggacgggacagagcgaatccgcttctgcctacggcactttctgggagctgacgcagatgattacacctatgaagcgttgaagctgttcctgatgggcgctatctcacgagcctttcagccggggtgcaagtttgaaatcatgctctgtctggtcggaggtcagggggctggcaagtccaccttcttccgtctgctggcagtccgggacgagtggttctccgatgatttgcggaagctggacgatgacaatgtgtaccgtaagctgcaaggtcactggatgatcgaaatgtcggaaatgatggcaaccgccaacgccaagagcattgaggaaatcaagtcgtttttaagccggcagaaagaggtttacaagataccctatgaaacccacccggcagaccgcccccgtcagtgcgtgtttggcggcacttccaatgcccttgacttcctgccccttgaccgttccggcaaccgccgttttatcccggtcatggtgtacccggagcaggcggaggttcacattttggaggacgaagccgcttccagagcctatatcgagcagatgtgggcagaagctatggagatttaccgaagcggcaggttcaagctggctttcagccccaccatgcagcggtatctcaaagaacaccagcgggattttatgccggaggacaccaaagccggaatgatacaggcgtatcttgataagtacaccgggagcatggtctgttccaagcagctttacaaggaagccttgaaccacacctttgacgagccgaagcaatgggaaatccgggaaatcaacgagattatgaaccagtgcattaccggctggcggtacttcccgaacccaagaatgttttccgaatatggcagacaaaagggctgggagcgtgaaaacccggcaacggactccggcaacccgtctgaaaaaacgatggatggttttgtggaggtcacagaacagatggagcttccattctgaaaatgaccgcccgttgcaccccctgttgctatcccgttgccgagccggttgccggggaaaaccccttatttccgggcttttctcccttataacaaccaaaacaacagaaaaataaaagaaaagtataaatagtaaccatcgccagattgagattgtttgcaaggtcttttgaagcccgttgccggacttcgttgccgacaccctctgtctggctattttcatgtatggaggataactgcctatggcaaaaaacaaaacagagattcatgttacaacggtgtttgacggggaactggacgccactgatgtgttcgtcagcctgatttcccagaaatacggaaagacaaatacaaaagaatatcttgctaaaaagaaagatataagctataatgaagatgaggttcaaaagagccagataccgtctggattgtgtgggtaaatggctatgatgaacgaaatggaatacagaacaatcggaaaggcacttgccgggggctatcgtgcagcggtctattgcaggctgtcaaaggacgatgacctgcaaggcgaaagtgccagtatcgcaaaccagcgtgatatgctggaaaaatactgcgaaaagcagggatgggaggttgtggcagtctatcaggacgatggcttcacaggtcttaacatggagcgtcctgatttacagagaatgttgagagccattgagcgcaggcaaatcaaccttgtcatcacgaaagacctcagccgactggggcgtaactatctgcaaaccgggcatttgattgaggactttttcccaaggaacggtgtccgctatatcgccatgaatgacggtatcgacaccctgcgggataacaacgatattgccccgttcaagaatatcctgaacgagatgtacagcaaggatatttccaagaaagtccattcctcttatcttctgaaagcgcagaaaggacagtttaccgggtgtcttgccccgtttggatatcggaaagacccagaggacaaaaaccatctgctcattgacgaggaaaccgccccgattgtgcggctgattttcggatatgccctgaacggtcatggtccgaactatatccgcagacggctggaggaagaaaaaatcccctgccccacatggtggaaccgggaacgggggcttcgcaatacccgcaccaaatgggaaaagaaagacccggaaaacgggcggtatatgtgggacttctccgttatcaaagaccttttgatgaatcccgtctacaccggggcgattgcttcccagaaaaaggactaccgtttcaaaatcggcacgattggggaaaagaagccggaggactggattgtggtggaggggcagcatgaaccgctgattgatcgcatgagctttgacattgtgcagaacaagctgaaatcccgccagcgtccggggcagactaatgaaatcagcctgtttgccggactgttaaaatgcggcgagtgtgggaagtcgctgacggtacgctacacaaacgcaaaacatccccagcagatttattcctgcaagacctacaatgcctttggaaagaaccactgcacccagcaccggattgactatgacaccctttacagccatgtgctgcggaaaatccgggaatgtgccagagctgccctgatggacggggaagcggttgctgaccgcctgaccaatacctgtgaagccgagcagcgggaacagcgggaagcaatggaacgctcccttacaagggacgaggaacggattgaggttctggacaaaatggtcatgcggctttatgaggatatgattgcagggcgtatcagtgagcagaatttcaacaccatgctggaaaagacacagaccgagcagacggagcttaaagcaaaagtgtccgagggcagaaagcggctgtccgatgaagtccagcttgccaatgacgcaaaacaatgggtggaagccattcaggaatacgccaacatcacagagctggacgcagccatcctcaaccgcttaatcaaagaaatcgtcgtgcatgagcgcattgacgaagataaaacaagacacatttctatcgaaattcattttaatctcaaacccatcccggaggtggaacaggtcactgcctgacctgtcccgccgggacggttctcttaacaacaccatatagattttttgtacgccgccgcccgccatcaagcagagttttacacctaattggggataaaacagcttatggcgggcggcggcgttgcccttatcggcatgacccttgtaccgctgctttccggcttgttcggttaagaagcgcgggtaaaggcttatgcagagcatacttgacgcgattaacgaatggataaaggaaatcctcataggagccataaacggtaatctgtcaactatgttcggggacgtaaacgaaaaagtcggcactatcgccgcagaggtagggcagaccccgcaagggtggaacgcaaatatattctccatgatacagacccttagtgaaaatgtaatcgtacccattgcggggcttgtcattacctacgtcctatgctatgagcttatcagcatggtaacggaaaagaacaatatgcacgacgttgacacttccatgttcttcaagtgggtgttcaaggcgtttgtggcagtctaccttgtgacgcacacctttgacattactatggcggtgttcgatatggcgcagcacgttgtttccggcgcggcgggggtaatcggcggcagcacagagattgatgttgccgccgcccttgcttccatgcagagcgggcttgacgctatggaaatccccgaactgctcttacttgtcatggaaacaagccttgtgagcttgtgcatgaaaatcatgtccgtactgataaccgttatcctctacgggcgcatgatagaaatttacctttactgttcggtatcgcctatcccgtttgcaactatgacgaaccgggaatgggggcagataggaaacaactacctaaaatccctgttcgctatcggttttcaaggcttcctcattatgatatgcgtcggcatttacgcggttctggtaaacaacatgataatagcggacaatctgcacagcgcgatattctcccttgcagcctataccgttatcctctgtttctccctgttcaaatccggcgcactggcgaagtcgatattctccgcgcattagcggcgtgtcaagggcagggtggagattttcagagcgaagcggcgaaaatacgacccgaccttgacgcggataacccccatataatacgggcgggcaaagggcatagattgacctttgccttgattacccttatggaaaattacagcaacaccaaacccagagaaaggaggttttcacttggcgtatgtacccgtacccaaagacttatccaaagtcaagacaaaagtagctttcaaccttaccaaacggcagattgtatgttttgcggcggctctcctgttcggcttgccgcttttctttctgctcaaagacagcacaggcacaagccttgcgtctatggctatgattgccgtcatgctgccctgtttcctctttgccatgtatgagaagcatggacagccccttgaagtggtggtgaagaacatcatacggacaaaattcatagcccccaaagaacgaccatacaggacagacaacttttattccgtcttagaacggcagagaaaacttgaaaaggaggtatcagcgattgcaaaaggaaacacgaagaaacagcgcggcgggaagcacaaagcctaacccgccccgcaagctcacccgcgccgagaaaaagcagattgcggaaatcatcagacaggcaaagggcgacgggaaagcccacaccgcgcagcagacaatcccctatatccagatgtacccggacggtatctgcaaggttacgggacggaaatactcaaagaccgtcgcctttgaagatattaactatcagcttgcacaggcagacgacaagaccgccatttttgagaactggtgcgacttcctcaactactttgacgcttccgtttcggtgcagctttctttcatcaatcaagggacgcagcgcggcgaagcggaaaaggcggtcaatatcccggcacaggaggacgctttcaattctatccgcacagaataccgggatatgctgaaaaaccagcttgcaaagggcaacaacgggcttgtcaaagcaaaatatatcacctttgccattgaagccgacagtctgggcgcggcgaaatcccgccttgcccgtatcgaaacggacgtactcaacaactttaagctcttgggcgtgtctgcccgccccatgacaggctatgaacgccttaaaatgctgcatggcattttccacccggagggcgggcagtttgcctttgatttttcatggcttgccccgtccgggctttccacaaaggactttatcgccccgtcctctttccgttttggcgaggggcgttatttccgcatggggcgcaaaatcggcgcggtttcattccttgaaatccttgcgccggaattaaacgaccgtatcttatctgacattctggacttggaaacgggcgttatcgtcaatctgcatatccacagtatcgaccagaccgaagccataaagacaatcaagcgcaagattaccgaccttgacaaaatgaaaatcgaggaacagaagaaagcggtacgcagcggctatgacatggatattataccgtccgaccttgccactttcggcagcgaagcgaagaatctcttacaggacttgcagagccggaatgaaagaatgttcctcttgacgttccttgtggtgaacatggcggacacgaagcggaaactggaaaatgacgtattcgcggcggcgggcattgcacagaagaacaactgcgccttaacccgccttgactaccaacaggaagcggggcttatgtcctctgtaccgcttggggagaaccttatccccattcaaagagggcttaccacgtcaagcaccgctatctttatcccctttatcacacaggagcttttccagacgggcgcggctttgtactacggcttaaacgcccttagtaacaacatgatactctgcgaccgcaagcagctaaagaaccccaacggcttaatcttgggtacgccgggaagcgggaaatcctttgccgccaaacgggaaatgacaaacgctttcctcattaccgacgacgacataattatctgcgacccggaagcagagtatttttcccttgtgcagcggcttgacgggcaagtgatacgcttatcccctacgggcaagggcattgacgggaagccccagtatgtgaaccctatggatattaacctcaattacagcgaggacgacagcccccttgcgctgaaatccgactttatcctctccctctgcgagcttgtcataggcggcaaggagggcttgcagcccgtcgataagaccgtcattgaccgcgccgttaggaacgtgtaccgccctttccttgcagaccccgacccggagaaaatgcctatcttgggcgacctctacaacgagcttttgaagcagccggagccggaagcggcgcgtattgcggcggcgttggagctgtatgtttccgggagccttaacgtattcaaccaccgtaccaacgtggagctgaacaaccgccttgtctgctttgacatcaagcagcttgggaagcagctcaaaaagttaggtatgctcattgtgcaggaccaggtatggaaccgcgtcaccgtcaaccgggcagaaaggaaatccacccggtattttatggacgaatttcatcttctcttgaaagaggaacagaccgccgcctattccgttgaaatctggaagcgtttcagaaaatggggcggcatacccacagccattacgcagaatgtcaaggatttgcttgcttcccgcgaagtggagaatatctttgaaaactctgattttgtcctcatgctcaatcaggcggcgggcgaccgggctatccttgcgaagcagctcaacatctccccgcagcagatgaaatatgtcacccacaccgaagcgggcgaggggcttatcttctacgggaacgtggtgctgccctttgtagaccgcttcccgaaagacaccgagctttaccgggtaatgacgacgaagccggaggaagtgggcgaagcatgaacgggctgaaaactgacaccatcatcaaccgggacgcgctctatgccttgcgggagcttccagaggaaagcgtacactgttgcgtcacaagcccgccctactatgcgcttagggattatgggcttgatatgcagattgggcgggaggacacgccggagcagtacattgacaggctgaccgaggttttccgcgagctgcgccgggtactgcgttctgacggtacgctctggctgaatatcgcggacacctactgcggcacagggaacaagggctaccatgcagacccgaagaacccgaaaggcagaaacggacagcagattgcaaaaaacaaccgcgtttccggctgcaaacaaaaggacttaatcggtatcccttggcttttagcttttgccctacgcgctgacgggtggtatttacggagcgacattatctggcagaaagaaaaccccatgccggagagcgtgaaagaccgccctacccgctgctatgaacatatctttctgcttacgaagtcaaagaaatatttctatgacgcagccgccatagccgagccgttagcccccacaacggcggcgcggtaccgcaccgggcgcagcgcgggacagaaatatgcggacgaagtacccggacaggggaaagtacaggggcttaaccgggcgagaagcggcagctactacgacgaagccctcatgccgaccatgcggaacaggcgggacgtgtggcttatcaataccgtaccctacaagggcgggcatttcgccgcgttcccgccaaaacttgccgaaacctgtatcaaggcgggctgtccgaaaggcggcgttgtgcttgacccctttttcggcagcggcacgacgggagcagccgcaaggcagcttgacaggcattatataggcattgagataaacgccgagtattgcgcccttgcaagggcgcggattggagggacagaaaaataaaacagtatcgagcgcgtgagaaagtcacgcagaaaatgacccgcgagggggctgtcgaggtaaacgccgccaccgggaaaaagaaacgtatcagcaagcggataagggacgcggactttgcaaagaccgaagcaccgcagccgccggaacaggcagcgcagaccataccgggcggcgcagctcccgcgcccacagccgccgcgccgccgcttccccatgcgccgggggcagaacgggaacaggacaccgccgcagccgagcgcgtcttggagcgtatcgacggggcgcgtaccagaaaggcgagcaaaaaggcggcgaggaaagcacaggcagaagccacagcaaaagaaaaatcttcccgcttgcagtttaccgacgaggaacgggcaacgccggagcttgaaaggtatatccgaaaatcggacaaagcagccgaccgtctggacgcggcaaaggcggctatccccaaagaaaagaaacttgtacgggagcgcacctttgatgaagccaccgggaaaggcaagacccgcctacattttgaggaacaggaaaagcccataggaaggaataagccccacaataacccgctatcccgccccgcacaggaagcgggtattttcgtccacaacaagatacattccgttgaaaaggacaattccggcgttgagggggcgcacaaatccgaagaactggcagagcgcggcgcaaagtacgggacgcggaaagtcaaggagggctaccgcagccacaagctcaaaccctaccgggcggcggcaaaggcagagaaagcggcgttcaaggcgaatgtggatttccagtaccataaatccctacatgacaatccgcagattgcgggcaatcccctttcccgcttcatgcagaagcagcaaatcaagcggcagtatgcaaagtcggcaaggaaaggcggcgcaaaaacggcgcagaaagccgcagagaacacccgcaaggcggcaaaaaagaccgccgaggaaacaaaaaaggcaatcgcttttgtagggcggcacccggcgggcgtatgtatcgccgttgccgcgctgctcttattcatcatggtatcggcggggctttcctcttgcggctccatgttctccggcttgatgaacggcatacttgggacttcctacacgtcggaggacagcgaccttgtggcgacggaaaataattacgccgcaaaggaaaacgagcttcagcagcagattgacaatatcgaaagcacccaccccggctatgacgaataccgctatgaccttgacagtatcgggcataacccccatgagttagcgtcctacctcaccgcccttttacagacctacaccccgcagagcgcacaggcagaactaaaccgcgtctttgccatgcagtacactttgacgctgacggaagaaacggaaatccgctaccgcacagaaacaagcacagacccggaaacaggggaaacgaccagcgaggaagtaccctacgagtaccatatcctcaacgtgaagctgacgaacaagcccatttccgagattgcggaggaacttctaacgccacagcagcttgaaatgtaccgcgtctatctggaaacaagcggaaacaagccgctgattttcggcggcggctcccccgatatgggcgcgtccgaggatttaagcggcgtacagcttgtaaacggcacacgccccggcaacaccgccgttgtagaccttgcgaagcggcaagtcggcaacgtaggcgggcgacccttttggagctggtacggatttaacagccgcgtggaatggtgcgcctgttttgtttcatggtgctacaatcaagccgggaaaagcgagccgcgctttgccgggtgccagtcacagggcgtaccctggttccagtcacgcgggcaatggggcgcgaggggctatgagaatatcgcccccggcgacgctatctttttcgactgggacggggacgggagcgcagaccatgtagggcttgttatcgggacggacggggagcgcgtctataccgtcgagggcaattccggcgacgcctgcaagataaagagctaccccgtcaattactcctgtatcaagggctacggcttaatgaattggaactgacaacaaaaaaatgaaaatctgaaaggagaaatttattgatggctatgaacaaaattgaacgtatcgacaaggagattgcaaagacccgcgagaaaatcaccgagtaccagaataaattaagggggcttgaagcgcagaaaaccgaagcggaaaacctgcaaatcgtacagcttgtgcgctccatgcgcctttccccgcatgagctttccgctatgctttccgggggcggtattccgggcatggaagccgcgccgggctaccccgcagaacccgcaggccacgacaccgaagaaatggaggacaccgagaatgaataagaaaatccttagaacactgaccgcactttgcgccgcccttatgctttcgggcggcttttccgtcaccgcttttgcacagaccccggagggagaggacgacaccaacgacagcggcgttgtctacgaggaaccccaaaaggaagaaccccttaccccggacgggaacgcgacccttgtagacgatttcggcggcaacaagcagcttatcaccgtaacgaccaaaaacggcaattacttttatatcctcattgaccgggacgacgagggcgagaacaccgtacatttccttaatcaagtggacgaagccgacctcttagcacttatggaggacggaagcaccgaagcagccccgcccgccgtttgcagttgcaccgaaaaatgcgaagccggaaaggtaaatgtgagctgccccgtctgcaaggacaacatgaccgcttgcagcggcaaggaagcagagccggaaaccgaggaaccgccggagctgcccaaagagaaaggcaatgcgggcgggcttgtgcttttccttgtcgtggcacttcttggcggcgggggcgcgttctattattttaagtttatgaagccgaagcaaaacgtcaagggcggcaccgaccttgaagatttcgattttgacgactacgacgaggacgagccggacgagggggacgggctttctgatgaagaacaggaggacgaggaagcatgaccctgtttaccgacaatccctttgaaaagatgatgatacaaagaccgggcgggcggcgtgacaatgcgccgcccgttccccattccccggcttgcgcttcctgtccgtacaaagggcagctcccttgtgtgggctactgtctgaaacaggtacaggagaaaaaggcaagtgagccggaacgctgaaaatggacttttaattttcgtttgcaacatctatgagattttcgtaatgcaaaagtgttatgttattttcattttgcagttggagctttctatcacgaatattctcaaaatctttacggagtccggctatcacagcatagtagatttgataagggcaatatttgtataattgtctgggtaactttgtattggagaatgagtgcttttccaattctgctacaattacattccaatttgcagcaatatacatttgccaatccctaacctgttcaatccctttattgattacttccccgaaacgagtacctttttcttttgttatccgcccgttgggagcttctaattccacaaagacaaattgataaccgtctgaactattacctatgagcagataatcagccacataagccgacccgattttgaactctggaaagatataattatcgtcatggtgtcctgttctgtaataatgccgtaataagccaaacaaataattccatgcacgattagaagctatccaatttagtatagctctttctgttgtatcggaagaagtaatcagttgataaaactcttttgtcgtatcatatataggtgtgaaccttgaataatggttgttgggaaatagcgaagtagcacactcaataaagtaatccatttctttgtttttaccgcgcctgtaatgcccgccacgttttttattcattgcttcttcctgttcatcagtaggagcaaaaacatcgaaagtatgtattgatttcatattgtcacctgtttcttatagtaatgcttaaagtataaaccaatttcaaacctaaaacaaccgaaaggagaacagaaaatgaaactgattattgcagaaaagccgagcgtggcgcagactatcgccgccgcgcttggcgttaaggaaaagaaagacggatatatcgagggcggcggctgcctcatttcatggtgcgtcgggcatttggtacagcttgcggaagctgccgcctacggggagcaatataaaaaatggagttttgagagcttacccattctgccggaggaatggcagtacgccgttgacccggacaaggggaagcaattcaaaaccctaaaagagcttatgcaccgcgccgacgtttccgaagtggtaaatgcgtgtgacgcggggcgcgagggagaattgattttccgctttgtctacgaagcggcgggctgcaagaagcccatgcgccgcttgtggatttcctcaatggaggacggggcaatcaaggcgggctttgcttccctcaaagacgggcaggaatacgacgcgctctttgcgtctgccctctgccgcgcaaaggctgactggcttatcggcattaacgccacccggcttttctcctgcctgtatggaaagaccttgaacgtggggcgcgtccagaccccgaccttaaaaatgctcaccgaccgggacgcggctatctcccatttccagaaagaaaaatattatcatgtgcgccttgatttatccggcgcggaagcggcaagcgggaggatttccgacaaggcagaagccgacgcgctgaaaggggcttgcgaagcggaaacggcggtatgcgtttccctcaccagagagaagaaaaccgcagccccgccgaagctctttgaccttacctctttgcagcgggaagcgaaccgcattttcggctacaccgcgaagcagacccttgaccttgcacaatccctttatgaaaagcggctccttacttatccgaggacggacagcagctttcttactgacgacatgggcggcaccgcagcgggcattatcgcgctgctttgcgaaaaactcccctttatggcgggcgcggacttcacgccggaggttgtaaaggtattagacagtaaaaaagtatcagaccaccacgcaatcattcccactatggagcttgcaaaggctgacccggacgcgctgccggaaagcgagaagaatatccttacccttgcgggggcgcgtctgctttttgccaccgccgagccgcatatttatgaagcggttacggcggttttctcatgcgccgggacagacttcaccgcaaggggaaagaccgtacttgcggagggttggaaagagcttcaacgcagataccgggcgacgctgaaagataagcccgaagcggaggacggggaaaatgcagacgtgacgctgccgaagctttccgagggacagggctttcctaaccccgccgcaaaagtaacggagcataccacaacgccgccgaagccccacagcgaagcaagccttttgtcggctatggaacgcgccgggaacggggacaccgacccggacgcggaacgccgggggcttggcactcccgccacccgcgccgccgtcattgaaaaactggtaaagggcggctttgcggagcgcaaggggaagcagcttatccctaccaaaaacgggaacagccttatctgtattctgccggatatactcacttccccacagcttaccgcagaatgggaaaacaatctgacgcagatagcaaagggagccgcagaccccggcgaatttctgtccggcattgaagctatggcgcgggagcttgtgcagacacacgccgcagcactggacgggaaaaaggatttgttccgggaggaaaagccctctgtcggcaaatgcccccgttgcggttcccccgtccatgaggggaagaaaaactattattgcagcaacaaagaatgtgcctttgtcatgtggaagaatgaccgctttttcgaggaacgcaagaccgctttttccgcgaagattgccgccgcgctccttaaatccggcaaggcgaatgtgaagaagctctactccccgaaaacaggcaagacctacgacggaactatcgttctggctgacactggcgggaaatacgtcaactaccgtatcgaagtgcagaagaactaaaaacttgaatagcaagcataggaagcgggtacccacttccgtaaatccccgttgcgacgctgacgcgccggacggggattttgcttgttgggaagtttcccaaaccctcttttgcggagggcttcaccctctaaaaattttcaaaaatatttggcagaaatgcgggcgtacccgtagtagaccatgcagccaaaaaatgcagcttatgacgctgccgcagagaaaggaggtttttcactatggcaagtttacgggacaccgtaaaggactatcaagacgagcttagggacggtatcgcatgggtggcgttctggaaacaggggcgttcatggaacgcggaatattttcatcttgatatggacgatacgctctacccggaggacaggagccggttagaggaaataaaaagcattgaccccgccgccgttatcttaaacggctactattgcgggcatttaggcgaggacatgagccttgacgagctgaccgccggagtgcgttaccactacgaaaacagcatgaacgacattgacggttttatcggagcgcatgacgacaggcttcccccggaggttatcgaggaagcgagggcagccgcccatgaagcggggcttcccttttccgaaaagccctaccgggacggggaggattttaacccctatgtatttgacgggagcatgagcattgaggattttgagcttatgcaccgcatgattgaaaaagaaaggagcgaacaaatggcagaaccgattttaagcggctatctttccaatcttgggaagtacaccgagggcagacccgcgggcgaatgggtgacattccccacgactgccgaacatctgaaagaagtctttgaccgtatcgggattgacttcaagcactatgaggaatggcatttcacagaatttcaatccactatccccggcttgacggagcatttaagcgagtattcccaccccgacgagctgaactatttagggaagctcttggaaatgcagtttgacgacgaccgggagaaattcattgcagccattgaatacggcgaccatgccgacagcttacaggacattatcaaccttgcacagaaccttgactgctactggatttatccgtccgtccacaatgaagaagaatacgggcgttatctggttgatgaactggaagaaccggaacttcccgaagaagcgaaaaagtatttcatgtatgaggaatacgggcgggacgcttccattaacgacgacggtatgtttaccgaaaagggctatatctacaacaaccgcaacacctttacagaatggtacgacgggcgcgacgtgccggaggaataccgggtaacgccgcagcccccgcagccggaaagacccgacccgtcaaaggtagaaatggacgcagccgcgccggggcagagaacggcgcagaccgcagagcagccacaggagccgcgcccggttatccctatcgtgctgacgagcgagaagcccgccgaaaagctcaaagagattaccgaccgtctggaacagggtattgcggaactctttgacagcgagcgttaccgggaatatctgaaagtcatgtcaaaattccataattacagcttccgaaacaccgtccttatcgccatgcagaagccggacgcttcccttgtggcgggcttttccgcttggaagaacaactttgaacgaaacgtgatgaaagggcaaaagggaattaaaatcattgctccgtcaccctataaaatcaaacaggaaatgcagaaaatcgacccgcacacgcagaagcccgttatcggcaaggacgggaagcccgtcaccgaggaaaaggaagtcaccatacccgcctacaaggtggtatccgtctttgacgtttcccagaccgagggaaaggagctgccggacattgcggttgacgagctgacaggcgacgttgaccgctacaaggattttttcgcagcccttgaaaagacttcccccgttcctatcgcctttgagaatatcgagggcggctctcatggctactaccacttggaggacaagcgcattgctatcaacgagggcatgagcgaattacagaccttaaagaccgctattcacgaaatcgcccatgcgaagctgcacgacattgacctcaacgcgccaaaggacgagcagcagccccacgttgaccgccgcacccgcgaagtccaggcagaaagcgtcgcctatactgtctgccaacattacgggcttgacacgtcggactactctttcggctatgtcgccgggtggagcagcgggcgggagctgtccgagctgaaaagctcccttgaaacgatacgcagcgcagccgccgagattatcaattccatagacgagaacttagcggagctgcaaaaggcacaggacaaggagcagaccgccggacaggagcagcccaccagagagggacaggaagccgcgccggagaagccggatccggaagcagccgcaccgggaaaatccggcgcacaggaaaaagcgggcgcagccccgaaagaagcctttaccccggaaacgatttacagagtgcgccggaacccttacagcgacagccgggaaaacagctacctcttgcaagcctatgtgacacaggagaacgggcgggcgaaaatgggcgacgtgctttatacgggaacgccggagaaatgccgcgagcttatggggcagctcaaaagcggcgagctgaccgagggcgacgtgaagcagctttacgcaaaggcacaggaaacggcgcagaccgccggacaggacaaagacaccttttccatttaccagataaagggcggggacgaaacaagggatttccgctttgagccatacgaccgcctgcaggcggcgggaaatgtggttgacagggcgaactatgagcttgtctattccgcgccccttgcgccggaaacttcccttgaagatatttacacctgtttcaatatcgaccaccccaaagattttaagggacacagcctttccgtttccgacgtggtagtgcttcatcaggacggacaggacgcggcgcatttcgttgacagtgtaggttttcgggaagtgccggagtttttacaggagcaaaagcagcttaccccggacgacttggaaacgggcgaaactgtcaagacaccgagggggactttccatgtgaccgccatgagccgggagcagatagaagccgccggatatggctttcaccaccagtcggacgacggaaagtatctgattatggggaatgggacgcgggcgtttgccgttgccgcagaacaggcgcagcgggacaatcccttgaaaaccgccgagcagaccacagagcagaacgggaacatgattgacggtatcatcaacaacacccccaccgttgacgaactggaagcaaaggtaaaggcgggcgagcagatttcccttgttgacctggctaacgctgtcaaagccgacaaggagcgcggcaagggagcgaagccggaaaagaaaccctctatccgggcgcagcttagagccgacaaggaaaaggcacagaagaaaaacgcaaagcagaagtcacaggacttggaaaggagctgacccatgccggaacagagcaaatttgaaaacatggatttgtttgcttcccttgaagcgattatgaagcagaacacaggcttttaccagagcgacttagacattgacaaagagattatcgcaaaggcggcggcaagcccccacagggaggacaaaacacttttgtggttctgccgcccgtccgggacgcactgtttccgggagcgcgacgttttcctcaaagacaccgcgccccacaacacatggcgtttctacatggagcagacaagcgaccgcgttcttgcctatgcaatcgagctgacgggaaaggagcgcgggaaaatcaagggcaatctgtacgaactggactactctaaacattatgagcgcgtcaaggaaaaggagctgcccgccgatacggtgaagctgatttatgagcatggggaaagggtacaggaagccgggagatattttgacggaaccccagacccgcagcttgggaaatttgaacgctttgaagccgtacccaacgacccggacgcgctgcaatcgctcttacaggaagaacggcgcagccgggagcagctttcgccgggggatttcaaggcgcatattgccgctttgcgggacgggctgattgaaacggaagcgcggcgcattgtgcgggaaatgaagcggcattacgagccgaacagcccgaacaagacccatttcatggcagagctttccccggcgttcatgcggcttgcagccacaaaggacactgaccgccttttctccatgctgccctacaagaccctttccttttccaaaatcgagggcagacatgggacgtatgcgctgattgacaagggggagaaccgggacagggagataaggaagccccgcccctctatccgggcgcagcttaaagcagacaaggcaaagaccgccccgaaaaaggcggcggcaaaaacaaaaaatcacgatatggaggtatgagcatgattagactgactgttgaagaaacaaaccttttgagcatttacaacgagggcggcaagcgggctttgattgagaatgtcaacgccgcgctgccctacatggacgcggatatgcgggagcttgcaaagcgcaccctttccaaagtggacgctttgaccgaagcggaatttgcagagcttcccatttacgccgctgatgaagtatgaacggggttaagcggctgacgccgccccagagccggaaagtcaacgcccttgtgcgccggacgtgctgcaattatgataacgggaactgtatcttactggacgacggggacgagtgcgtatgtccgcagctcatttcctattcgcttctctgcaagtggttccgggttgcggtgcttcccgccgacaggctgctttatgcggagctttaccagacaggggataagaagaaatgtaccgagtgcggcgcgttctttgcgtcaacctctaacagtgtcaaatactgccccgtctgccggaaacgtatcacccgcagacaagccgccgagcgcatgaggaaaagacgcgcccctgttacgcagtaggcgcggaaaatcccttgatttacagggctttccgggcgtgaaaatcggataggcgatactttatacctttacccccaaaaatggcgttctactgcgtaacattcacgaaaacagcacccataaaaagacagggcgcggaagtcatatactggcttccgcgccctgttctttttttgcctatctgacatttcccttttccatttcttcaagcgggaactgcgggagggcttctatcagcttctttgtgatggactggcgcatatcttcgttgatttcctgtttcgtgcttccgtccggctgtctgaccgctaccgtcgatagcctgtcgatttcgtccttgtagcactccacgactttctccaccgcccatttttccccggcaacggcggcgcgtatggtttcatattccggcattttctggttttccatgctcaacgctcctctgctttttgatagccctatcatagcacagcggcggggattttgctatccttatccgcgctctgttcccttttcccgttccggctgcctgtctgcctgtaaaatgctgtcaatgttctgcttgataatatcgtattcccggactttctttttcagcttcccatagtcggcataaagggcttctttctgcgcttggagggcttcatattccgattgcagcgcggcaaggttcgggagctttgcaatgcccgccgctttcagcgaccttgcggcggcttcatgtaggataatcgcctgttcctgtccggcgcggtacttctccctgttccttgccttgcggtatgcgtcatagacgggctttgtcttttggtaggtggaaacattcttgataagcaccgccatgtccgcaagccgcttttccgcgtccttcaatgcgtctgccgcctgtccgctttccgctgccatttcttcaatccggctgactaaatccgcgtactgttcaatcttatgttccgtcaagaaattcatggtctttgctgcctgtttcagattgtggattttcgcccactgttcatagcccttactctgcgccgccttgatactgttctcaatgtcgataagcagcgaaacgccgcgctgctctctgggggctttcgccgcctttgcccgtctgcccgctatccgttcccttatggcttcctctgtataatccgcgccgagggttttaagacgggtgaagcgttcctgtccgggggcgcggcatgacacatatttccccggctttatctcatagcccgccgcctgtaaccgctgcaacaattcctcaaaactggaaacttgggggataagcgcgtcaacggcaatctttagcttgcctttccaacttgtacccgtcttttctgcctggtactccgcatagctctttcccttgctgcccttgccgggaacgacgacggacaagccattttcccgacacagcttgtcgctcatgttccgtatgccgtaatagctccttttgttggaattatatttgcggtggtctacgaaatttacggcgcagaaaataatgtgattgtggacgtgtcctttgtcaatgtgcgtcgtgagtacatattcatgctgcccctttgttaccgcgtcggcaagctgctttccgatttcatgggctttctgataatcgacttcccccggctcaaaggactgtatcagatgaaaggctaaattgttccccttttggagtgcttgggacaaggtatattcaaattcaatatctgccgtttcataggagcagccgaaagaggacacaagcatttttccgtccgtcttgtccgggttttcgatatagtcaagggctttgcttagagtgcttttaataggcttaatctttgtaaccgccatatctccgcaagcaccccctttatttcctctatgtcctcttggtatgcgttccccgtcgcgtttacgcggcgtgctatctggttgacgttgacaccgattttctgtatctctgcggtcattgcctttatatcggcatggtctatctgaatgatatacccgtcaatggcaatcttccgcagatatgccgccatgttccgggtgggtacgagcttcattttttccagtattaaatcccgttccgcttccgtcactctgaatttgatttgcaccgttcttttgcgtccgttcatgtattcgctcctttcctttccgttccgagggtttgggacacttcccaacaagcaattttcaaccgacgcgccgcagcgcgggaggggaaaatacggaagtgggtacccgcttcctatgcttgctacgaatgtttttatcccttatgccttactacggagctatgcccggttttgccaaacttccgcaaaagaaaaacgctgcaatcctcaaaaaaagattacaacgctctctaaaccttattcaattctgacggacacttcttatctgccctctgtttcgacttccgctatctcctttgccgttgcgctcacaatccgtatgcctgtatcgctcataccgtcaagaagcgcgtcaagctgccgccgctgcgtgttcttctctggcggcgtttccaaaagaaactggtctacggatatattgtagcggagcataagctcaaagaaaatctgtaaacttgggtgctgccccttgttctcaatgttcgcaaggtagcgcggcgagataaacatttcgtcgctcactttcttgcggctctccttgcgccctgtccgcgccgcctttatcgctgccccaaaagccttgaaatcgtatttcggtactggtctttttgccatagttattcaccctgttacattttactgttcccctttcttcttggatatgtctacacaattcaatcagttagccaaaataattcatatgtatatgttgacaattagccgctttttttgtatagtattattaaaagggggaaatgtttatgttacatagcatgcgtattcgataagcattgaaatcaaaaaagatttttcccattttcaatatgggcttttttgtcatgcttattttgcgtatgctatacaacaaaactaacgatgtatagacatagtataaaaactatgccttaattttgttgtagtgttatatgtataaatgcaggtcaatgctcatgttgagaattgacctgtatttttttgcacaaaaggagaaatattatgcttgaaaaatattggataaaatgtccaatttgtaacggaaagacgagggttcaagtattttataatacggtattaagaaattttcctcttttctgccctaaatgtaaattaacacatatcattgatgttgaaaaattagaaatcataatcaaaaactctgaaaaacaaaaggaaggatattaaatgaaacacttacctaaaagtacacttacggaaatattgaatgacccatacggatttacttacaaagaaatgtcggaagtaattggagaggataaagcaagagccttatatgcggaattgtataaacagccatttcacaaaaaaaatctatcaatatcaacaaaaaaagtctataaaagtagcgatactgaaaagtatgtttatgaattgaaagacaacaggtatatcgaaacggtttttattaaacggcgagatggtgggactgtttgcgtaagtacgcaagttggttgttctgttggctgtattttttgtgagtccggacgcaatggtttcgttcgtaatctaacaccatctgaaattgtgcaacaggtcatattgatacgtcaaaaagtaaatcgtatcgtttttatgggaatgggagaacctttattcaattacgacaacttgattgcagcaatccatattcttcgagatagaaatggacttaactttccaaccgacggcattaccgtatcaacagttggtccagttaatcaattaaaaaaattgcgcgaagaacatctaaaaattcagttgacaatatctttacatgcagcaacacaggctgcgagaaactgcatcattcctcatatgcacatgtacgctattgaagatgttgttaagcaagcattgtcctattcacaaaggcataatcgaaaagtggtatttgcgtatttgcttttaccaggtataaatgaccgttcctcagatataaggcaacttgcaaaatggtttaagggcaaaaatgttatgattaacgtgctgcaatacaacccgacgagtaattcaaaaattagagcaccacaaaaacaagaaatggttgcgttcaaacatcaattagagcaaacaggacttgaagttaccatgagagtttctcatggtagagagattaaagcagcttgtggacagttagctaatacatataataaagccaaaaaacaacaaaaataatttaattaaaagagccagacgcacagacgcagagccgataatatgcagtttgaaatactgctgttatcggctcttttttgatttaatttgtgcccccaataaccatattggagcaaaatcagaactgttgcttgtcgttctttgatttccgcagcagctttgaaaaaccaaagccgccgtttctttttatcttctaatgaaatgacgcggtatcactgttaaaagcggcggctaaaaggaggtagccgccatgaagcacataccatatcgacaaaatccgacggtcattgacacatcaaaaaaagcccgaccaccgccggggaaaactacgtctatcaatatgaactgtctaatcatctgaataccgcttacaatacctatacgtctgtccgggcttttcggacaggcgtattttgctgctcaaaaaattttttgaaaaaaatccgaaaatcttcggcgtttttttcaaaaggcagtattgccccgcgaaaagggggaagcaccaccaactttccaacgagaaagggggtgagaatgtggaacctaatcgcagggagtttataaaacagtgcgctttccagaagttttgtaatacggtactgcacaatgaagcgtgtgacgctcacaaagagctgcacaggcataaggcaagggagattaccttttccgacttgaccttagaagaagcgcggcagcttcatacctttgatgaatatttcaaaggggaaatcgcctttgaaagagccgggaagaaaatcacgccgaagctgcttcttgaagcaatccgtactttgccggaagaaaagcgcaaagccgtactcctgtactatttcgagggaatgaacgacaccgagattgcggagctgttcgatacgtcgagaagcacgatacagtacaggcggacaagctcttttgagctgctaaaaaaatatctggaggaaaatgctgatgaatgggacgaatggtaacgaacccggctacccggaaaaagcccttgttccctatcctgtcattttggcagcgacaaagggcgacccggacgctatgaagattgtcttgcagcatttcagcggctacatagcccgcctctccatgcggaagctgtacgacgagcgcgggaacgtctattttggcgtagaccacgacattcgggaacggctgcaagcaaaactgatgatggctgtcctcacctttaaggcagaggaataaaccgcagcggcgggacgctttctctctcccccttttccgttccgctgctgacgcggcagcaaagccattctgaaccttgacaaagaaagcggcgcaagataacggcggcgcagcatagggcaaatcggatacgttccttttgcgccgagccatacggtgggtgcgccatgacgctatccgggtgaggttatccccgcccggacagccgagcgaccaacaccgcgccggaaagcaagtgtagcggcttgcgggcgacgacacgcaaaatatacaatgatacttccttacagccacagtccgagcgttaagagcgtcgcaggcaatgggtagggctgcatgagaaccatgcgggggtgcaattcccatgaggttatgctgataaccgtccgattaaagcctttgttttcttgaatagtggacttgctgctattcatagactgtattatatgtttgcgaaagaaagggggattttctttgacgcaaaaccagacgcccgttaccacaacggagcataaaatcggaaaagttacttaccttgtatgttcgtccgcaagtgaacgcgcaacggacacactggataaaaagataaagaagctcattcgcaaggacatggagctgaaccccgcaaacgcccggaaatagggcgtttcttcacattttatacatgacacaggcagcggtatgtggtataatatagacagtacaaataccatgcttgtctgtcgtcggaaaggaggacaaaatgttacagacagacaagattaccgctttatattgcagattgagccaggaagatatgcaagccggggaaagcgaaagcatacagaaccaaaaactgattttacaaaagtatgctgacgaacaccactttttcaacacgcgctttttcgtagacgacggattttccggcgtgagctttgagcgcgaggggcttcaagccatgctgcatgaagttgaagccgggaatgtggcgaccgtcataacaaaagacctttcccgtctgggacgtaattatctgaaaaccggcgaactgatagaaattatctttcccgaatacgaagtgcgctacattgccattaacgacggtgtagacacagcaagggaagataacgagtttacccctctgcggaactggttcaacgagttttacgcccgcgacacttcaaagaaaatccgggctgtcaaacaggcaaaggcgcagaaaggcgagcgcgtcaacgggcaagtgccttatgggtacatagctgaccccaacgaccgcaaccacttattgcccgacccggaaacggcgcacattgtaaaacagattttcgctatgtatgtgcgcggcgaccgtatctgcgaaatccagaactggctacgggaacatgaggtattgactgttgcagaattgcagtacaggcgcacaggaagccacaggcacccccgcccacacccgaattgtatttacaactggccggataagacgctctatgacattctggcgcgtaaagagtatttggggcataccattacaggcaaaagctacaaggtatcttacaaatcaaaaaagacgaagaagaacccggaggaaaagcgttactttttccccaacacacacgaacctttgattgatgaagaaacctttgagcttgcacagaaacggattgccaccaaacaccgccctacaaaggttgatgaaattgacctgttttcgggacttctcttttgtggggactgcggctataaaatgtatctgcaacagggagccgggacactggaacgcaaacacgcctacacttgcggcaagtaccgaaacaggataaggactggcgagctttgcactacccattatatccgaaagagcgtccttaaagaacttgtccttgctgatttacaaagggtactgtcctatgtgaaagagcatgaacaggagtttatcgaaaccgccaacgagtgcagcgcaaaggcagtacaaaagacgctgacgcagcagcggaaagagcttgacaaggcacagagccggattagcgagctgaatatcttattccgcaagctctatgaggacaacgctttagggaaactttctgatgaacagtttgcttttttgacttccggctatgatgaagaaaaaaagacgctgacccggaggattgcggagctgtcacaggaaatcgacaacgccaccgagcgcagcgcggacgtgaaaaggtttgttgcactggtacgcaagtacaccgccattaccgaactgacctacgaaaacgtccatgaatttgttgaccgtattcttattcacgaactggataaggaaacgaacacccgcaaaatcgaaatcttttatagctttgtcggcagagttgatacaggcgacaagcccaccgaaagtatctcctatttcagacagataggagccgacgtaaagagttatgctatctaacatacatcaaaaagaggtaagataacgccctctgcaaaaaaggttacgttatcttacctcaacaaaaagaacgccgctgtagccgtcgtcaatcttttccgcaacaacctcaatttccggatgcctggcaatgtagtcgtcgatcagccgccgctggttggcaacgctgtcgctttccactgatttgtcatccgtataagaaagacggatgtacttaatggtcttgtaaacctgcataaaaaaacactcctttctttgcgcagaaaaatccccgcaattcaagaagtgtggctatgccgtattcaattccttttccgatttctattctaccacgacctcgcgggaaagtcagccccttactgaaaaatatccggcttaccgcaggattcctttgatacattcctccagcgtggcgccgccggaagcaaaactggcgtggacggtaaactgtccgcacttgaaacggtaagggtttttgatctgtcggacaaattctgcaatccggtcctcacgggaaagctccctgtcaaccgtaacatcccgaatgtctaccaatgtatcggttccgccaacagcaggcgtgtgttccataatatcagctccttcctgaaaattcctggttatcaaaaccacatgaataggccggacccacggctactaagcacataaatccggcccattgtatctgatttcgattctgtctgccgtatttgccacgcacccccggcaagccctgaatatacaaagctggggctgttacaggctgcggtcagctttgccgcatcatagccccgcatacgccgccgctttgccagagcaagcaaacgccgcaggaactctccccaagtctttagggagccgtgaagaagtaccattatgatctgcgccgtcatcgcgcccggcctgccacagccggttttgtgggttacgttgatcgctcggacagcctgattcatcacctcctcggctgcctgtctccgcgccgtcccatctgccgctcggaacacagaatgaagtacctgtaacagcgtatattcggttgtcaaggagcaggcgaggggcgtggcagttatgacagtatttcagttagggcgggccggagagcatgctgcacggccacacccgtcaggcttgtcctaccgaatatgtccctctattaagtagtacatttttcgggtaaaacgacgtggccttttataattttttttcaaaatatttttccagactcctaaggccacgacgaatactgtcttttacagagttttcagagcagccctccttcctggcgatatcagctttgctcataccgaggaaaaagtgttcataaattcgatggcgctgtttctccgacaaggcagacaatcctttgaaaatcagttccgacgtctgctgctgttctaaaatttcctctggtgtgggctggtccatcagcgcatccctctctatgccctcgtgtccttccagggaataaaatgcttgataacggtatgtacgaatccggtacgcttcttccagcaaagtatactcccgaagcagcaaagcgacttcatccggcacttcaacgatcacatccgatgtataaaacgggtaatagtcccgcagattgatttctttcatgggtatttcctccaatttcaatttgtttgagtggataagcaaaatcgaaatcagagggcggggagcggcatcccggacagccttctgtaacacaggcagccggaaggcttgtatgatccgcagataagaaaaaagcgcgtacctgttttgctataggtgcgcgccaaatggaacaatttgatgattgcggggagaaaagataaaaatatgtcgatacaaaaagcgccgcagccttttgagctgcggcacaaaaatatatttgattatatcgttgtcgtttcctgtggaaatataagactttcccaatgcacatgttcgcccccatatctgggggaacataaacagatcagtcaatatgtgtgaatatttcccccaatctgtttctttggggacattatataaggtataactatcagcttccttgtacttgtctttcagaatactccaatattctcattttttattattgactttttgagaattaaatttatatccaacaccacgaacgctggttacgtattctggcacatcaggggagatttgaagtttctgacgcaatcggctcataagattatggatggcctgcgccgtgacatctatataatcctcatcccacacatggtaagcgatggtttcaaaagtcagtacccgcctccgattgataatcagaagatggagagcatcaaactctttagcagtcagatcaatttcctgatcgcggatacataccgttctcccttccaggcagaaatacaaatcgccgtcccggatttctgttaatgtctgtatagaatctgcctgtgcaggagagttgttgaagacatcaggaagactgccggaaaaagaacaatcctgtatatttctggtaataacataagaagtcagttctttttgctgtttttcatcaagtaagacaaacagcttctcggcaatatctccaccggactctgacaagtcaagcactgctaatttcccatgctgtcaccacctctttcgttctctaaagtctctttcaatttttgaaacgactcatcgctgataacatgctcaattcgacaggcgtcttgttcggcgatattcctatcaactcccataaaaacaagctgctctgtaaaaaacaaatggcgttcatagattttctcggcaatccccagacctatggcggtcagatggaggaatccatcatcatccacagtcagaaaaccgccgcttttcaaaacgcccaccgcatgactgacactcggtttgctaaagcccatgtgccgggcaaggtcaatggagcggaccatgccttgtttcttttggagtatcagcacagcctccagataatcctccccggacgcatgaatcttcataggacctcctatcctcaaaggttataccgcccagccaaggctctcctgctggatgtagaacaacttgtgatacaaaccttttttcttcatcagttcatcatgtgtgccgcattccaccaattttccattgtcgaggacaatgatctggtcggcatccacaacggtacgaagccggtgagcaatcataatgaccgtcttgccctccaccagttttgcaatggcccgctggattaaaacctcgttctccgggtcaagggatgcggttgcctcgtccagaagaatgatctgggcatctttcagcagcgcgcgggcaatggaaatccgctgacgctcaccaccagaaagcgtgctgccgttctctccaaggacagtctgataaccgtccggcaatctctggataaattcgtcacagtatgccgcctttgccgccgccatgacctgctcctcggtagcgttcctattgcctacacggatattgttaaaaacagtatcgttgaacagggtcacatcctggaatacaaaggacatacagcgcatcaggtgttccggttcaatggtgctgacatccataccaccaatggtgatctggccttttcttacatcccaaaagcgggcgatcagtttggaaatcgtacttttgccgctgccggaaggccctaccagggccgttacgctgccagcaggaatagaaaaagacacatccttgataacatcgtcctggttatatccgaaagtgacatctttcagttcaatgtcatacttggatacatccttatcctcgccctccatagcgggcgtggtcagcagagtacgcatacggttggtgacagtctccaaatgaaacagagaggtcaactgtgagagaatggcaaggatcgggccgtaaatctgtgtggagaacatgagcagcaccaacagggggagcagttcaattttgctgccggttatcagcaccgttccaatgaaaatggtgatgccaagtcctgcttgcaggatcaggctggctccctgaaccagaataccggaggccagttccaccttaatggcgatttttctcatggcctggagtgctttatccaacgcatcaaagcgggaaccgccaaggccgcaggatttgatgattttgataccttccaggtattcctgaatctggctggacgcctccagcttcacatccacctgtttgtcaaacagacgaagctgcaacttgcgcccgcccaagatgataaggaatgtgaccggcattgtgcagaagatagccagggccatgcgccaatcaaaaaacgccagacaaatacaagtcagagtaacagagataatattcgcaatcagcggcgggatggtactactgagcatggattccatgctgctgcaatccgccatcatgttggtggtaatgtcggacaagtcctttgtgttaaagaagctcatggggagcttgcgaagatgctccgcgatccgaagtctggtcgtgctggcctccttataggaagcaatataggttttcctataatcgtttttcgcggccaggaacaccagaatagccgccaccagccccaggcccagcagcttccacaacgcggcccacgaaattgcttctccagtaaacggctttaacaactcccaaaagagcaggcaggctaccatagacggaagcaacagcgcgatattggttattgtgcaggccgtaatcgcttttttcaggtcggagtagcctttctccgacagcattaacttttctttcaacttactcatagatcacaccgcctttcctgtgccaattttccagttgatcgactccgtatagctgctccacatctgtgcgtattttccgttcttcttcagcagctcgtcatgggtgccggactcaatcagacagcccttttccatgacaaggatctggtcagcattacgaatcgtggacaggcgatgggcgatcattacaaccgttttattctggatcagcttttcaaaggctttttgaatcaggtactcgttctccgggtcgctgaacgcggttgcctcgtccagaacgataatgggcgcgtcttttacgatagcccttgcaatggcaatccgctggcgctcaccaccggaaaggtggacaccggtgctgccgatcacggtctggtagccgttcggaagctgctcaataaattcatggcatcttgcagcctttgccgccgcaataacctgttcttccgtagcatctggatttcccatacggatgttgtccaggatgctctgtttgaacaggaacgtatcctgaaatacgaagctgaccttatccatcagcgcatccagcggaatgtcccgaatgtcaacgccgccgatttgaatacttccgtccgtcacatcataaaaccgggagatcaagctggcgatggtactcttgccgccaccggaagggccgacaatggctgtcaccttgccttgctccgcaaggaaggaaacatgagacagggccttgacctgggaatcggcttcgtaggaaaagctgacatcctgaaaagcaatcccatagtttttaattgttgccgccgtactcttttcgggcagggtcgggatacgcaggatttcatccatacgctccacgctgccgtcaatctgcgtgaaggactccgagatatacatgatcttattcaggatgccggaaatcgcatggacaataatcaggtagaaaatgaatgtcagcgaatactccctgaaatccgtggtgtgcatcccaatcagaacgcccacgggaatcaaaagcagataaatattgttgatgatcgtggtaaaagcaggcatacagttctgccagcccaatgcgtactccagcacgaaagaggtatagtctgtaatggatttgctcaaccgcttaaaggaatcggcggtctgattaaatgctttgatctccgacataccgcgcacatattccacggaggcgctgttcatgttttcctgggaggtctggaaacggtgcattttttcctttgcctctccgttgaaacccgcaaactgcacgataaaggccagaacaataccgaccagacaaaccacaccataccgccagtcaattccaagaagaatgatgaccagaacaagcggcgcgaccagcgaggccacaaaatccgggagctggtgagcgatgaatttctcaacgctttcgatgttttcgtccatgatctttctcattttgccgctgcccagggtcagatgatacccaaggggaatctgcatgatgtggtcggcaaaggccaccttcaattcataaagcgttccaaacgccgcaacgtgggaacacaacagggcaaagaagtaaaatacgatgttccccaaaattccggccagggccagccagccccaggttgagatcgtggaaacattcaagagtgacatatccgggtaaacaaacaggatttcccgaatgatgtagtagattgataagtacggtacaaaagaacagatcgcagccagcgccgccaaaacccctgccaggaacaccagccctttatggccggaagccagttccaggcagcgtgccagtccggttttcggtttcggctgctttttgttttgctgtgccatttctaaccctcctttttgtcatatccaattttgtctaagagaagctctgctcccctgatttgaaaatcatcggtaatgcagccgttctccaggcgtattgcccgctcacagcaggcaagcgcacactccgcgtcatgggtaatgacgataatggtgcgccccatcttcgccagcttgcggatcatcctgctgacattccgcatatttgtaccgtccagcccgcttgtcggttcgtccagtacgatgatcggcgcttcatgcatcaacgccacgccaagggccagccgctgcttttgccctcctgacagtgtggagggatgctgtttgacaaacggcatcagctccagggcctccagaatttcctccgccgcttttttccgctccgggctgacctccgcgccggtagtcagttcgtccagcaagtcctcaccgaaaagctggctgtctaaatcctggggaatgtaccagacctttcccaagcggcctttcggtctgcaatgctttccgaacaaaacgacttcgccggatttctctttcaatagccctgccaggattcgtcctatggtgcttttgcccgtcccgttagggccaatcagggctaccacttctcccttgcggcattgaaagtcaatatcctttgccacaatcgtctcaccaaaagagtggttcagctttttcacttccagaacaacctcgttggttgccgcagatgggatttccgcctgctcgatctggtgcaggtcaggagtgcgaagccccagcacccggatttcctgattggacagggctttcatctgctgtgcggtaaattcccgcacaattttccctttctgcacacacaggaaacggtctgccagatccatcagatagtaaagccggtgttccgctatgatgatggtttttccctgctgtttcaaatcgcggataatgtctgcaaagcggtaggtggatgcaatatccagattggcagacggttcatccatgacatagatttccgggtcaatcgcctccgcagacgcaatcgcaactttctggcgcatcccataagacaggctgtgcagactgtgatccagaatgtcctgaattttgatgtccgccgccgcccggtgaacatggctctgaatgtcctcatgggaatacccgtagttctcacagccgaaagcaatctcaccagctacctcattggcaaaaaactggctcctggggtcttgaaatacattccctgcgattttgccgcgctcccaagacggaatctctttcagcggttttccgtccacaaaaacctcaccgcttaaatccccctcgtagaagtaggggatcagaccgttaatcactctcgtcaaagagcttttcccgctccctgatgggccggtcataacaatgacctccccagcggcaatgtctaacgatatgtgttccagttgatttccgttcccgccataggaaaaggtcaggttacggatcataatttcttttcccattccattcctcctataaaagacagcaacacacggcagctcccacgctgacaacaatcaaaaagtaatccagcgcagcgatccggctgacatagtagctttctttcttgtaggggctttcaattcccctgacaatggcagaagcggctaactcgtccgcgatctttaaggagcggaacaccatcggaacaatggcgtattccaacgtgtccattggatgcctcaaaacattgccaaccgattttaagaagccacggattttcatggcttccctgacttctccaaattcatgcagcacagtcggagcaaagcggagcatgacgatcaaaacaagcatgatacgggtggggatcggcatttttctcaagctggccgtcagtttcccggacggaattttcgccagaagataggctggcatagcggggagcagcagcttgtaaatcatgctgagtaacagcggtgatgggatactgatctgatactttgtctcgatcatcagccatacaatcgctaccaaatagaccgcaaagcatccaatagcctgcttatacaagccgaaccagcacaggatcagaaaaatccaaaaggtaaaaatcccatgtccccaaaaactcgtggtaaggaaagtcacaaggcaggcgcacagcgtcaggaaaagaactgtgcgcccgtcaatccggtcaatccacctttgctttttttctccggccatcatcctacaatgccagctttttggaaatgctttctgagcaggcgctggccgaacaacgtaccaagaattgcgagaaccgcagtaatgacaatacctaaaagcatgagcgccggagaagtcaccatagagagctgcatattcaaggtatttgcatcaaaaccgctgcttgctgccatttcctgatagctgtcccaagaccaccacagcggtacggcacagcctacaaaatttccgattgagttgaccatccaaccaattcggttacgaactgcacttcggtatgtattcttgccaaccatgcataactcagcaatgagggctacaatcaagaaatagggaaccaagaacatataacccataacaccttggattagtccataaacagcagcccaagcaaacaacaatccatgtttgttgatgcgatttgccgcaaccaaataaaatgttgctccaataaaggcatcaataccagcagagccgtataaatatactgctgggaaaggcaatgtaaccataccaatcaccattgcaattgcaaaattgatgaccatcattgcggcaatcgtcataatatctcgaacgccaatttttttctttaccatttgttccatctttgaaacctccttaaaataaaatgacagtgtagttagcaataactaactacactgtcattttacaccggtttgcagtctctaactactccaaagggaaaagtaaatcaagaaaacagcccaaaagttaaatcacttttttgctttacggtaatcctttggaagcattccaaacacttcttgaaaagccctcgcaaacttactaatatttgaatatccaagttcaccggctatttgcgtgattgattgatctgtttcctgcaaataaacagccgcaagattcattttatactttttgatatgtgcatagggcgtatcgccataaatctgtttgaaaatagcttgaaatgtgaccttgctcattggctcctttcgcaaaagttcttctatggatatttttttgtcgaggttttctatgagctgttggcggatgcgtttgatgatttcaatttgttctttggcataatatgttgcctcatactgatcttcaatccgcagctgtttgatatgataaaagagttccaataatttgatacggaaataatctcgcccttcaacaccttttgcagcgtacagttcatcgaagatatgtaataatcgctgtggtgtccgacataaaaaccactttttttctaattccaattctcgtccgagatttagaacatcaatgttgtagtacgaaaaaatctgttgtgtttccacatcgacagaatccttatcaatcacacagcttagtcctacactatatccaaagggaaaggaataggccgcaggaatattagcaagggcattgatgcaaaattctccctctttcatgtggaaaactttattatttcttagctcaaactcaacgcgtcctttttggtaatgacggatttcaatgatattcttattaggaataggctcatggaatgtatctgagcagttaaaatccataaaaattaaattgataccagggaataatgagtaatcatataaagttccagtcccattgcatttatattttatttgaacataatcattatatttatcagaaattatagcacattccccgtaccattctggtttgtggagttcactcatgctcatttccacctccctatcagttgatataaactaattatataatagttttttaagtagtttagttaccaattagaaagaatcactctgtgcttaatttttatttgagtaatacatcatcgctctaatttattggaaaacaaatcattgtagagttgattgtggtaacatttattacatgttataacaagatttaacctcttttcttttccacgcaaaagcatctatagtttcaactgtatcatcttcaccatgcagaaccgatcagaaaccgccatactgaccttcgtggacatctttaagccgtttttagggatgtaacgatagtatggttcatccgtaatcacctttgcattacccccgatctttgccgccagttcttccactgcatcgacataaaagaacatctgcgcatcggcatggcctacctgcctcatgtacttcttttgcatcattgccatgccttttctgttcacggtatcaaaaacaacttccatatttccaaattgcccaatcatacgcagaagggcaatgaccttatgttcctcaaaataatgaaataatccgcctgcagtaacgagaataggagcatcaagtacatcattgcgaacttttttgatccaatcctttgcaaaggcatccccggaaatatataattccctctctggttcgggaagaagatctcgccggtattctatcacatgcggtagatccacggcataccagtgtgtctttccgttatcacatcggtgataggttgtctccagaccacagcccagctgtacaatcacaccgtccggtctgcgttccagaaaagcccgaataatccgatccatattagcagaccgggaagcagaggccaaaagggtatactggttctgcatattctgttcaatcaagtttaacggtagcctatttttcaattccaacgcctttttatcatataaaatttgtgggcaatgctcagcagcataaattcttcccagcatagggacaaacagggtatcctccacgactcctaacttggacatagccaaacctcctgttttgatacattactttctgccgacaagcagccgggaagaccccagcatcatcatggcagcccgacggtgggagccaaaagcttcctgtgcagtgtcaacgagtcgtacttcctcataccccatatctcgtagtttctgcgcaaaaccttccatgtcaccgtacatctttggtttcatatcatcgttgagtgcaaagacgccgccttttttcaatacccgcaggctttccagcagcagtttctgcatatcagcacccataacattgtgatagacatagttgctgatgactacatcaaaactctcatcaggaaaatccagctgcttcgcatcaccgtgctgaaatacacagcgggaagccacgccctccctggcagcattcttctcgcagagtgctttgctgtgattatacacagcgccccagtaatcaacaccgatcacttttgctttcggccatgtcagagctgaacggattgtcaatgctccggagccgcagcctacttccagaatcttcccctcaccgtcatagtccagatgagagagaacgactcgatgaacctgttccatgattccgccaccgccaaaggcatactgccgcctgatccatgtgatccagatcagcaaaaccaaaagtgcgattgtgataacagtaaacagaacaccaagaacagcgacatgtaatacataaaaagagaggacagccagcacagcggccaaaactccgattccgccaatgatgtaaaagacagggttggacatccagcttccatagtcttctccgtgggtgccaagtcggatattttcctgcttacaatggttcttgttcattacatttcctccttctttacgcaagtttccaattctggctttctgtctgcagttttaccatatgggcatatacaccattcttttcttccagatcctttggtgatccttcttctgccacggtgccatcagaaaggacaacaattttatctgctcctgctacggtacgcatcctgtgggcgatgaccagaacagttttatctgcgatcagacgggaaagggctgtctgtatcaaagtttcattctccacatccagggaagcagtagcttcatctaaaagaatgatcggcgcatttttcagaaatgcacgggcaatagagatacgctggcgctctccgccggaaagttcacagccattttccccgatattggtatgccatccatccggcagtttttccgcaaattcatccacattggcaagtttcgcagcagcaaagacctgttcatctgtggcgtctttgtttccgattcggatattttccagaatcgtattgtcaaatagtgtaacatcctggaatacgatggaatacagagaaagcagtgtttccgggtcaattcgggatacatccatgcctcccacggtaatctttcctctgttaatatcccagaaccttgctgccagccgggatacggttgtttttccgccgccagatgggccgaccaaagccgtaacctctccctgttttgccgtaaaggaaacatctttcaatacggtttctccggtattgtaggcaaacccaacatggtcaaagacaatatcatacccctgattggaaagcctgtcgctgccctgctggatcggatgatcgagaatttcattcatacgggcaatgttggttcgtgtactgatgactgccgcaagattctggagtgcgccctgcagagggtcatataaacgggatactaccagaaggaacataaagaatgtaagcacggagaggcttccttgcatgagcagaacagctcctgccagcgcaaccgttgcaataccaagcttcagcaccagcgatgcggaaaccacaaaaacagcaaggccgaattcattgaggatggaacgatgctccacggcacggatcttcttttccagaccttttaaatatgcctgctccgcgttgttcgctttcaggtcacgaaccgtttcaatgcactcctgtatcccgtctgcgcaggccatcttcacatccatcgctttctgattcagattttcctgaatctttgcggaaaatcccacaatcgcaaaggcaaccggcagaacccataaggcagccagtgccattctccagtccgtaaagagcagaccgatagaaatcagaaccgtagaaatgatcgaacccgcaagctcagggataaaatgcgaaaaactctgctccaggaaggtgcaatccgccataatggtactggtaagatcggctaaatccttttttccgaaaaaggaaagggggattttgcgcagatgctctgcaagggtaatgcggcggataccgctttctttgtaagtggcaaaataggtcgcattgtattgaaagaaagtggtcagcagaatcaagccgatacacaccacgcagcctgccacataaaatggaattttcccaccgggaacacccccgttcatcagatcgctgaccaggtaatataaaagtcccaccggaaacataaaagacagattctgaaggacacaggccaggcagcctttgatcaggtcttttgctccctgttcagacagggcatattttttctgcagttttttgatcatatcactgcacctcctttgttaccttccattgcacggaagtctggtaatttttccacatacggctgaaaatgccgtcttttgcaagcaattcacgactgttcccgcactcggcaacctgtccgtcctgaatgacaaaaatctgatccacatttgttacggtagaaagcctgtgggcaatcataatcactgtctttccctcggaaagttttgagaaagcagcctgtacacggctttcgttatccgggtcagcaaaggcagtggcttcatccagaataataatcggagcatttttcagcatcacacgggcaatggcaattcgttgctgctctccaccggaaagatagaccccctttgtaccgatgaccgtatccacaccctgtgggagtttttccagaatatcatcgcattgcgcgtgatgaagggcagtcagaacttcctcacgggtagcttccggttttcccatacgcacattttccagaatggacgccttgatgagacggctgttctgaaatacgaaagacaccgtgttcatgagttcctcttttgggatgtctttcacattaacaccaccgatttttaccattccgctctggggatcaaagaatcgggaaattaggttggcaagggttgtcttaccaccgccggacgggcctacaaaagctaccgtctgccctgcaggaatggtcagtgaaatatcttttaatacttctttttctccatcatagctgaaatgaaccgatttcagttccacggaagcgttttgaggatgctttggatgtttcgtttcctccagaggcttcaaattcaaaacactgtcaattctctgtaaagcgtcgtctacgatcatggcgttttcactttggaacataatgcgtgtcagtgtgacagaaataaccggcgtaataatgatatagaaaatgagatccagtaagaaaccggaagtcacaccgtcttgtgtaagcaacagtcctccggcgatcagtgtggcaaaaactccgttgatcgcagctgtatagaacatcatcggtgtccgaagctgcttggtataagcaatcacccatactttataccggtcaatggagtctttaaacttcttaaaggaaaagatcgtctggccaaaggtttttaccaccggaatcccacggacatactctaccgcttcgttggacatatcatccagcgcattctggtattctttcatcttttcctgcatctgctttccggtcattgtcatcatgatcagaaatcccagcacaaccggaacaaggctcaacagtcccagtctccagtcaaatgcaaacaacagcaccaaaagaccacagggggttgcaatggcattggctctgtcgggaagctgatgagcgagataggtttcagtggctgcgctggattcgttgacgatcttgcgcagttttccgctgccaaaactttcggtaaaacctaagggaagtctgacaatatgttccatggtctggatacgcaggtttgtggcgatacgaaatgcccctaaatgggaacacatcagccctgctatgtagacaagcaccgctataaccgcaaacaatactgccatccagccattaccggtcaggttctgtgcctggccaaaattcggcgccacctccagtacttccttgatcattttccagatgtaatagaagggtaccagagcaatcagggcactgattgcagaaagcacccaagaagcataggtcaggtacttatggctgcctgcaatttccagcaggcgtgataaattggattgttttttcaaaaaaattcctccttttctttgtgtttatgataaagagaacacgtctatgttcttacaatatccgaattcgagttagctctagctaactattaagtaaaaattataaggcattactgccccataattttcatccatcccgctgtataaaaggtgcgcatttctctgacgtagttttcggcatctttgagcggcatttcgtggatgatcaattcaaaaaaagtatgaaacattccggtgatcagaatatgctccagcgaaggatcgatacgtggagagggccttccaagtctccttaaaacattctgataggcatgggttccatttgtttcaatttctaccatttcatcaataaactctgcaaattttgttccttccgagcagcagagaagcagtttacattcctctaaatgttcatacgcataatgaagaatatcatccatgcaaagccccgaaatatcactcatgacttccggctgctgtacagcaggaagctcggcaaactcctgttgcgcctttataaaacggttgagaatatattcgtaatgctcacaaacgatggcttcaaagagttcttctttgcttttatagtaaccgtaaaaagcaccggtggtcattcccacggatttcacaatatttcgtagggaagcgtctttgtatcctttttctaaaaattccgctttcgctgcccggtggatacgttctaaagtagtctgactttctttgattctgttcacctccataacactgttatatatcactgttatattatatgatgtgcagtgagttttgtcaagaatctgttcctattttacaagttcgcaagcaatgcaatcttacgtaagattgcgtatttagcagaaatcccgttcccggaattcctgctaaatgcttgttggtgacatatccccaaacccctgagatcattgccggtggcaatggctgcgcgttccgttggaacgctgaaagcgaaaagcagacaaccttattgacgagatttttctgtgctgcgctgcagttgtggcggggaagaaatctccaatagatattccacattagcccgaacattatgaagttctttcatatcatttttggcctgcttataggcagaataggctttccgtttttgttccagaagatcggtgtattcctcccggagagatttgacagaggggagctttttgattcccaactcgtcaaaatgattctttgccgcctggtgcagcaaaatttcagactcatgtgctgttcggtattttttgctgtacccggctttgcgatattctacatagacagccctcgttttcgcatagtttacgatctgcttttgcagctcggcattggcgttcattcttgactccaaatctttgatctgaacggataaggtattgaaattagtggtagcggcgttggctttttccagaagatcctcataacccatatcgccatgttcttttaagtagagcactgcctgggaaagctgttttaagttgaacacttttgcccaacgctcataaccgggacctttgccggaacggattgcagcctctatatctaccagcaatccaactttggaaaccggtttttttgaaaaagtatggcgggattttactatccgtgtaccggcaattcgttctttgatggcctgttctgtataatcgcctttgagcgtatcgcatcgggtataattttcctgtcccggaactcggaaccgaagatgttttctttcacggttaacttcaatcccggcagcctccagcttctttagaagttcctcaaaatcttttggcttttcctctaatgcagcatcaatagaaatgcgtatctgctcctgaaaggaaggctgctttttatttcctagccatgtgccataatgctcccggctgggtttcggattttcaacaatcgaaagtctatgctccaaacacagcttgtcattcattcgccggattgcccaggtagagccccagaagttgcgaaattttttctgacagtccagtgtagtagagttgatgatgatgtgattatggacatggtgcttatctacatgagtgcaaacaacaaaggcatggtttccttttgtgagtttcagtgccagctccctgccgatctgattggcttcttccggcgcaacttcgccgggcttaaacgcctgacgaagatggtaggcgatcacatcatccgaaccctgatttctgccggtcagatttgcatactgtcgtttggtcagaaggaattctgcatcagcaagccgggtatcacactcatagccataaatgaattttccaaaatcggttttctgcggattttctacataatcaataatatctgcaatcgcagtagagatgtcccgaccttttcctacatgcaaaggcatcagtcttgtggtcgctattttcgtcaccccctaacttagaatttgatccatatataaaaaattgtggtagcactttagttaactcggccgaatttgttagttattattaaatttataaccatagccaattactgtttttatatactcgtgtcccttgcaatatggttttaacctttttcgtatttgaaaaatcgtgttttctactgcgtgcaaatggttatttgtgggttcatgccaaatctgtttataaatctgttcttttgtgaatgtggtttgaggagattgcagtaacaaataaaggacttcaaattcgtttgttgataaataaacttcctgctgtcctaatattacacaatgccggttaacatcaatgtgtaaggtgtgatttgtttgctttaatccccaaaattcttgtgccattgtccggtcattcgcaatttgttcaagcagcaaggataattcattaaattttctaacttccctcaatttcttatataggttgacagttatcgtacacccgtatatatccttatcaaaatcaaaaatatgtgtttcgattgaaataaagctatcattatcaagtgtagggcgcgttccaatatgagtaacaccataatatatcttgccacttaaaagaatatctgccacatacacccctgtctttggcaaaaatgtattttttgctatttctatgtttgcggtaggtgtccccacatgctttccaatacctcggccatgtataacaatccctgttagtgtgtaaataggctcatttattttttctttcatttcaatcctcatataatcccattcattgacaggataatcaaaacacaagttactattataaaacttgccagtataagcaggccagtatgcttttgtcttgcttcattttccaaagtagcaacatatccgctttttctcaaagcggtaactatgggcttatacagtaaaaatgtaatggacgcatttaacccacctttcaataagttaaatggaagaaaggcaggaagtaacaattctacaactgcttctcttggataccccatataaagcggcgttaccaaatagttccacaacagcataacgataaccgttattagccagcccgatgccagaccaatcactgcaccagataaagtgtgcttttttttataaatgacagatgccgtacacgcaaaagatagtgtttgtacgatattcataatacaacctaatattccggtatcgcttactgtaatcatttcaagggttgctacaataacagatacaatgcaggaagtcatcggcccccagataaagccgcccaaagttacaataacatcggatggatcatactttaagaatagaataataggaatcctgccaacaaccatagtgacataagtgatcgcacatagcataccaataactgtgattctttttgttttactgttcataattgctttcctccgtgacaaaaaattaacacccaaaagaaaatgtctttcaggtgttagcattataattaggccacagaaaagaaagtaatcctctcaaaatctgcgaaaatctaaccatatcttctttcatccagactatactgttggttttggaattacaccaaatcgtgcgttttacgctcgcggactttaccgccaatcgggaatttcaccctgccccgaagacacttttattcagttgttttccctgtaattataacatcaactatttttggaagcaatgaattgaagaaagttcggaaatatttcggaaacttgcattttatgaaataggacttaccaccaattcaattcgccatgttctctgacataagaggcagaatgataataaataggtgttgtatctctcaataaaatccctccaatcaaaatagttataattgcagaaaaagagcggggctgcctatgcgccccgccaaatctgcttaaccaaatataaaatcctttaaggcactgtttgccccgccaatgatccctaccagccatgcagccgccagaggcagaccgtatggactgataagaaaggcgatcataagccatgcaagacccggcaaaaatcctgcgacaaagaacagaaccaatgctgccagaaagatgatcccggaaagaatcccaagtaccgcaccggaaaggaccactaaaaatttacataccagataaagaatccccgtaaccagcataaagggaagtgccagtaatttacctatcaaacgcatacgctttgcctcctttcagaagggcatctgcccttataaaaattttaccgtgacggcaaaaagaaagcaacgactttccggctgtttatgaaatgtttgcaaatccccggatcagtttatccatgccatcccaaaggctgtccagacgggtgcggatgtcctctatatctgcggcataaatactgccggtctcattggcccgtctggtatattggtttaagttattggaacaaatgcggagaagccggatcatttcctgaatatctcccatatcaaggtgaatgatgtaaccgtctacggccatctttctcagatatgccgacaggttggtaatgccaagttccgccatgcgttcttttaccagttcagcctccggttcggacatgacaaattcgacgcggacggattttttgttatgcccgcccttcatcgttccaaccctcttttatgagatgagacctcctgcgtcgaaaccgccgtttttgcttttttgagtttttcccgcagggtggtcttttccagcttatcaagatattcctccagatttccggctgccgcatgatagttgcgtttgaagcgttcccgttttaggatcatcataagttccggctcattttccggcagataagtcattgttttaggggctccatgctctggcataagccggttcataagctgtctccgttcctgatagggaatcgtgataacatttccatcctcaaatgcaacggctacatttccgattggacaggtcaattttttcatccgttccacatgttctctgtaatttagcggatagagatcgcctaatatttttccgtccctgacttctttcaaagaaatggcataagccaaaacaggatcatttgtctgttcctggtaaaaccgccacactttgttttcatggctgccctccagataaacttcccgttcacgcagggtataggttccgcaggggcgtgacatccaaagaagctgtttatcctctgaacggtctgacacagccagttttgagatcagttctttatccaggtcaaagtcctctttataatgttgggtatgaagatctacgatacgggaaagagcacccagaagctctacatcctcaaatcttaccccagccatcagcgttccctttccggcacaggagggattatttgccttgcttcatgctccggtttgtctgctttcagacggtccttcaaagacggctttgcttccggcaccagctcccggatttcttcatctgtctgtccatctgttagatccggacgcacaggaggttcgttgttcatcctgccatccagcatattgtagttgccggtttgtccttcctcataaagttccgcattgcgaagataactttccggcgcctgaaacggctgtccggcaaacaggatttctctttgggtagtaaactgtgcaaggacgccattttgcagtctcgcaaattcttcatactggcgcagggtaagccctcgttccagcatttccgtctgggtatgcgcccagccttctccataaagaaaataatacatgtctggctgatcacagacaaaacacagggagccgtcctgattgtcatagtaagatggctgcatatcctgataatggcagcgttcctcgcgccccaaatacacacggttgtccgcacccagcatagcgaccatgcctgcgtaattactatggaccgcagagcggatttctaccagtggatctgtttgagaaggaatctgtctgcccggaatctcattttgtttttccgctgcatcatttcttggtgtcacttcttcatggctgcgtgcatccagttccggttgagatgttcctttccgaacagcaccgggttccggttctttttctttcacatagtatcggacatttgctgtcgtatgctcgttggcttcctttgcatagttttcagcatcggctttgctatcaaactccaatggttttccattttccttgcaccagctttgtgccggtccgaaaatagaagtgctgcttcgtactgcccatacaccataggtcagtttcttttccattccgcatccctccttatcgttcctgttgtttggaagtttgttgcttttttaccgggtctgccggttttgttgcttttagctgctgacggagagaattcttatgctccggttcggaatctgtgatgttgacatattcgccaatgatacaaagcgcttctccataactgccggaagcaaataccctgtcagacatttcttttgcctgttctttcagaccatgctcccgcaaagtacgggaagcaatacccagcagattaaaaatgttcccatctgctccgatcagtggacaatccggtttatctgccaacgcttccggtgtttctatgaatccgcctaaataattcggcacaaagtccgacagccatgtgccgccatagacttcatgggtctgtaaacgccacagggcaagttttcctatatccagtttcacatcatcaaacgggtaaagcagacaggtcagttcgccgtgctgaaaagtggccacattctcaaactgactgccatctttcaatatgcctgcatgtgtcagcatttcattgatcccgtccacccactctgtcagatccccgccacagccctgtaaaatcagtccttccttatctgacatacggcgaaggtcctctgcagtaatcgtgttgatattcaaaaaatcgcctcctatcgtttttgttaaaatatatgttttgtccgcaacttaaccttatttcaaagcaccggagtattcttatacagctcccttaaaaacaggtgcaaaaagcccttgaaaatcaaggactttttgggctaagttgcggacatatcatggttgattttgccgtttcctgcgtttgcgttcccgctcggatttccgtcttgcatagatccggcaggcatcagaacaatatgcctggctggtcgtaggaagatatgcttttccgcacacagggcatattttctgtctcatggaggtgtcctcgccggtaatagctgattccaatgcggcatccaccggcagcaccgacttttcaaagtacctgcaataagcgccagtccaccatttattcagcatatagcaagagctgtccaaaggaaggcagatcttatcctgagagtcatagttggcgcacagctctgtaaccagctttcggatcgcagcccgttccgagcggttcaattctctctctgccataacgcctacctttccggggctctgctttgccggccactggaaattccagttatgtcagtaacattcctgggctgtgaaagggcatcggcgatagagttccgctttttctgtttcggttcatggtaaataaaaagttcgttttttccaggcacatacaataagccgttttcttcgcagcggaaaacatcacattctttgtcggttgagatggcataaaaccccttgtaatcatagggcaccttttgccgctcctgataggtacacatccctaagttggggtcacttgccagtcgtttcgatatggcgaaaaagtcaccttcttttttgtgaaattttcgtatgggcgtgaagtgataaccgccatattcaaaggtttttcgatcactcatttacgcctgcctttctttacgggaaattccagcttgaaattcacatatttaccgccggtatcatccaggatcacttccgcatcataggtctttcctgttttttcactgtaaagcccggacatagaaatacggccctctttcaaaagagccgctgccacagactttgtgatggattttttcttgctggaaaagaaacggttatctttccaaagagcaaaagaacattccctgttgtcgcagaaaaaacctttctttccttcatataccggggcgccgcagcgaggacatacccctacggcttcatgcacagttcctttggaagaaggaaacagatccgcaaaacgttcctccggggcagtatgttcttttaccagcgtccggctcatatctgcaatctgatccataaaagatgttgccgacagttcgccatgttccacttgtttcagcatggattcccattctgcagttaagatgggagacttgatattgtccggcaggactgcaatcaggttccttccttttttggtaggaatgagctgttttttctttctctctacaaatccggcagaaaccaacttttccagtgttgccgcacgggtagccggagtacccaatcctttacgctcggcatcgtccggcatatcttccgcaccggcattttccatagcggacagcagcgtgtcctccgtatagtgtttcggcggtgaagttttcccttcacggagacttgctgatacagtttcaaaagtctgtccttccttcagcacagggagagcggcatcttcgttttctctatgttccgtttcactttgcctgatactcatacggtgaatccgttccacctctttccagccggactgtaagatggtctttccttttgccgtaaaagtatgtccctgacagtccagcatagcggtgaccgtttcaaaccggtgtgcctgcgttgtggcacaaagcagcctgacggcaagcagggtaagcacatcccgctccccggaaggaagctcggtcaagtctgtttgtgcaatttcaacagttgggatgatagcatggtggtcggtcactttgctgtcgtctgttacccggtcaatgtccagctctccggcgcagccttttccaaagggcatattgtcgcgcagccataggatcagggaagcggcggttgccagcatgtccttcgtcaaatactggctgtccgttctcggataggttgccagcttcttttcatagagagattgcacataatcaagggtctgttgagccgtatagccataaatacggttacattccctttgcagagttgtaaggtcataaaggcggggaggctgtatggtttttacctgcttttccacagaacgcacaaaagcggagttgtggtcacaatccatacggattttttcagcctcggatcgttccgtcattttttcgccggaagcagtaaaacctccgcaggtgatttccggcacataaaaaggcttgctgatgaaggattcaatatccgactcacgctgtaccaaaagtgccagcgtcggtgacataacacggccgacatttagtgtgacaccatacaggactgaaaaaagccgggtggcattgatcccgatcagccagtcggctcctgcccggcatactgccgcatcatagagcttatcgtaatcactgccgggacggagacggtcaaagccctcccggatcgccgcatcctccatactggaaatccaaaggcgttccataggcttattacatccggcatattcatagaccagacggaagatcagttctccttcacgcccggcatccgtagcacataccacagaatccactcgtttgtccttcatcagccggcacaaaagggcaagctgcgttttcttatcctttggaacttcatatttccagttttccggtaggatcggaagatcctcataccgccatttggcgtactgttctttgtaagcctccggctgtgccagttccaaaagatgtcccacgcaccagctcaccagatagccggaaccttcgagataaccgtcttttctttccgttgcgcctaatactgctgccagtgacatagcaacagagggtttttctgcaatcacaagtttcatatttttgtaacctccatttcttatagacttacttcactgcggtgcggctgctttggtgctgtgtgatccgcctgctgaagctgtgcttttttatccgagagccgtcctaaaacgcttttttcctgtccacgctgcagcagctttgtctcacggtcataatactggactttatcagaaaggcggtcctccggggctacctgggtagcattgacctcccgtaccatagcttccaattcggaaagctgcatggaaccattatccggcaaaatcagcagctcatggatcgatgacggaaggacataataattggttccgagcaattcagcgactttttccaagacaccttcctgtgctgatacggacgcaccatttaatttatcctggttagtcaggatataaatgggtacaaatcctatatccagcggttcttcccggttaaagagattttcaggttttacagagaagatactttctgccatgacttcctccatgtcataaaggcagacaggacttctggcatgtgcagcctgcatggcatctttatgaagctgttcttttgtgataccccacatctgcatcatgctttcggtaacagcaaccgaagcagttccttcctcatctgccgcaacctgaatcctgtaataagccgccagctccccgcaggaagtataaggctttcctttcagatattcctgatttgtttctggatcgcacatctgtaccgccagcataggacggaccgcttcatagttttccagcatagagatgttcagcggaacccggctgtaattttccaactggatctgtgcgatctgtttcatggcagtatctaaaggcatcccacgttccacctgttcggcaagcgcttccaaatagatagttggtgcagcctgttctccgggaagaagaatcgtcagcccggtcagcatccggtcattgctttttgttacttcattgatggaaattacggcgttctggtattccgtaggcaggtattccttgatatggctttttacatagtctataaaattttgattcaatcgttgtcctcctttttgtccgttaaatttgcgttgtgtttggtttctgaatgttccatgttctcttttccgacctgcataagacacatcagcataacgccggaagccattcctccggcaaaggtaaggaaatgtaagatcaggttccacataaacattcctcctaaaaatgggcaaagaaaaacgcccacttcaaagtgagcgcatcaacaggcagctattttgtttttggtttcaaatgatccggcaggacgatctctccaaccgggatttcccgcagttcctttttcatccggtgtgtgaagcggatcgtctttgccgtaccgccgttttcccgtccgtcatagacagcaatcacgcggtcggagtgctccaccatatagcggtttctgtgggagtagacgcttggaagatatttttcctgaatgacaacaacatccgcacaagcctccagcagttcacgggtccttgttttcttattcaggctgtccagacgtttgcagtaaggaatcactgcaatcagctccagcgccggattagtctgctttctttccaacaccagctctgcaaaatactgatccacgccatctgcaaagccactcataaaacaggtgaatccatccgtaacagctgcatcgatctcatgttccaaagcggcttttactttgttgatctcattctgcggtaaatccctgtgtccggtaacacagcaagtctttcctttcatcggtcatccctccatctgataggtaaaattcttcacttttcatatagtaatagattttatttagcaagtcaacgataataccctttttccctttgcggataataaaggggtgtaaggtacaatctattacagaatgggaggtgaaggcgatgtatgaagattttgtcccggaacgattagcgaagctgcggacacaaaaaggagtttccgcacgcgatatgtctttatcgttaggtcaggcaaacaactacatcaataatattgagaataaaaagtcacttcccgctatgcagtcttttttctacatctgcgaatatctgggtgtgacaccgcaggaattctttgacgaaggaaatacttatccggaaaccttgaaggaattcattgcagaggcaagacagcttgatcctcaatccatgcagtatatcctcggtattatgaaagaactcaatagcagaaagtaagcggtcatggtaacggccgcttttttcgtgaccttctttattatagtttataatgttctcgaaatgtccgctccctataccgataagtattcaaaaactgttctccaaacagcctttttctattcgccggtactgccaaagcttccggttcctcgctctgttcccagatctgttacaaaatccgcaatgacgatcggcgtgatcacaagctgcccgatacgggctcccttaaaaagagactgcggctgattgcttacattgctgatgatcgcatggatctctccacggtaaccggaatccacaggcggcagttcacagaccagaccttttaccgccatgctggtacggggaaagatatatcccgcatatccatccggtatttccagtccaaaaccaagaggaattttggcgacttctccgggttgtaaggtacagtcatagggtagataaacatccgctccggcatcattgccatgcggacggtaaggacgctggtgctccggtacgccaaagtcgatcagttttattttcatcggcagcctccttcccaaagagcaggatagtcttttgctaaaatatcctccggcgtcatatctgcttgcagttttcgtccgcaggtcattttaccttccagacatcgatccatctgacaaaaaggcccggtcagtgacggggcaaacaaagcagggcttagttcataaagttctttccagacctttagcagcacgatccttgtttcatctgtatttctccggcatacccgctggctgatgatatgtttccattgataaggggtagcgctgatgagcagtacattccgcaatccctggggcgtggcatatccagccgcatcgtgcccgcttccggcagtgcacagggcttcataacatttcatgctttcattacagctttttaagtacaattcccgtaccactgccggagccgtcataatagaatacgggacagcgaaatccgcctgtcccgtatagttgctgtactgcagcgatgcactcataaattttacttcgttctggtggcgggtgatctgcgccagaaaacgcctgctggcgccgacaatggctaccgtaatcaccgcaaatttctggatggtaggatggggaagcgcccccatagctgctactgtctgaacgctgaatgatttttcgtagagctccatcaggtcatccattgaggcaatcttatgtccctgctgggtaagccttgccgcaaagaccatgtttttttctgcttccgccaccgcctggcagttcaaaatttttacttcgattcgtttaattggtatgtccctcctttacaatcgctttcagtaagaacagatagttaagactgtctgtgatcttttcattccatgtgtccatcgggtaaaccgcttcctcgtcaaagcacatatcgtacagagaaacaatatgctttgccagcataccggcaagggcacgctggggcgttgtatgctgtaaagctgccgctgccttaaatgcacccagccggtccgggtcatccccggtgtattctttggtttttcgtttcaaggtatcagcacagagccgtacctgttcgtcaaaaacggcattgacttcattttgcgtaatatggcatccctcctaactgaaaacagccgactggatttctccaatcggctgtctggcttaatcatttattctgcaatggtataatgggtgtttcgtgcttttcctttctgttctaacaagttagtttttaccatttttcggatcactctggcggcagtagaagcgcttacttcaagcaatcctatcacatcatttcttgtaattgcaccatgttttctggcatattccaatattttttcttcttcgtcacttagtttcttttcagtatgaaccgtaaccggtgtgccggatttcgtttttacagttgcattttctgtttcgtattttgcgttgatattaggcaatatgatcttaaaggcatttttcgtggtttcaatcacaggctttacctgcatactttcgtatgccttcataattttgcccattccggttccatacgcctcaattaagtgcaatcggtaaaatacattcgcaaggtcctgatttctgcacacagaaatgccaaccataacatcctccaggtctatgcctggcatcagccctccgatagatacaaactcaatccgattctcataaatactgataaaagcgctggcactaaaagaatagtcacggtgaaccagcagattaagcaatgcttctctgacagcgacttccgggtaatccctgacatcaacccggtatagtttttctatggttgcacgggtctgattgcggaagtcaataaaatcatatacttcgttcatctgctgcatcagcgatccggtaaactcccgacgatccttgaaaatggtctggtccgttccctgaaagaccgcaactttaatggtatggacgcattggtctgacagaagcagcgccaggttactgtatagcccatcctgatcgatcaatttcaaagtacgcatctgctgtgctccaaagtcagttttccgaagttcaaattctttttttgttgcctcaaatgtaaggtcctggtttaagcagcgcatcgcttcaaaacgatctccgtctgtttcctttatcatgcgccggattgccgtatcagttgccggaacagaagaatatccctgccgaacatacacaccttccggccgcattccttttttggcaaggtaataggggcgatccgttccacgctgaatatctacaacaacaacatttttcccattttccacgatggtttcataatgcaggaacatggttatatccggttttatcgcatcccttaccatattgctgatttgaagggaaacactatccgcattatccaatccgataaccgtgccatcgtccctgacccctatatacagttttccgccatcacagtttgcaaaagcaatgatttctttttttatgtcgtctaccacaacttctttcagttctacggtttcgctttcccgaaaaagcatagtgccatctcctttatttcaaatttgtaagtctatcatatcaaatcgtgtcaatcatgtcaataaagctgacacgattatgattcgattatgacacgatattctcattgtacccgcaaactcaagaaataattacgtgatagttcctacaagttcataaattttgaaaggattgtgttagaaacttttgtttttctaaccaaagcatgatacgattgacccgataaatgacacgatgaaataatccagagatagcttttgtcccgaatattgtgtattattcgggacattttaagcactcggcaggtagatccagtcgtgcatcaggcacacgctgggttcgtcctccctgggaaccagacggtaggtacattccccatagaccgtgcgtttgtcctcgatctccatgccataggctttataaaagcggtattccagattggagatgatacagcgcagggtttgcagagcctccctctgtgctgatacgatcaggtcacggtcaatgctgcgcttcaaaaacagcagcgatttgtaaagctgtacctctgtgcggtaagggcggcagtctttcgtttccagccatccgcaaaaagcgaccggtccgctctggatcacactgcggtccgggtgataatactcgtagcagtccaggtttgccgtattcagaagatagagcatttcccggacttcattttccggcatgtcgtaaaatcgcaaaagcgagcggtaaagatggacatagccaggaatggaaatcatggtatttaccataaaataaaatcctccttgtaaacagcaggtgcgggagcttttgcccccgcaccgtctaaaatctatatttcgttatctactttcacgagttttcccatgacaaggaagcgtcctgtgccgcccggcgtacaggtagaaagggtcagtaccttatcgctgcaggtcacagtcacatcactttccaccgcggaacgttccttcatagccgtaagccaggtagtataagcaccgtcatccttccaggaaagctgccagggagaagtttcattgccggattcttccggctttgctgcaaacgccgcaaagatctccatgacataaccacccttcggagtaacgagatacatctgcctgtgggtatcaaagtaactttgttcatcgtaccggttcagcagggcaaacatggaaccatcccgcatattatggccgtagacgatcgtattgcggtctgaaaaatctgcccggttttcataatcggcaaacaggcagccaaccttgttataggttccgtcataaagatggttcaggtaatactcgttgttgtcagtctgcgtcaccggataattgagcaccgtatcaggaagggaaagccatccgatgatgtccggtccattttcacggagcgcttcaaagtctaccgaaggcaggacaatatcggcatcgtcctgttttgtttctgtcggatcggttgcctgctccggggagtctgtctgctccggtacttccacatatccggcaagatcccgataggcgtctttactctcggcatactggttcaggtcacggaacaccaaaaatccgctgccaagagccaccagagcgcagagtgaaaggacagaagccccgacagccgttctttttggggaagtcctgctgtcttttccctttttgaaataatacacagcaaatacgctgccgccgatcagtgcggctgccaacagtccgccatataggaaaatatacggatcatccccggtctgcggtaccggcttttgaggggtggaaggattggacggaacagaaggtttttccggcttttccggtttttcattaaagaactggaccgtagatgtctggtcagctttgatttccaccgtagcggcatcaggaatgatgtaatccttgcttgcccggtttgcaacttctgttacggtataaataccgacacgaaggcccttgacttcaattacaccggattttggagtggtgaatgtctcgcagtaggagccgtccgcgctcttgacctcgatggcaaaaccatctttgcgcccgtcgctggaatcctttgtgatctttaagttgccgcggtaagcctcattggtaaatccgtgcccggcttctccattttccacaactgcgacctgtccatcttctgtgatggaaaaatagtaagcgtttgggtcaggctgatagccctccggcgctttgctttctttgataaagtagccgccagccagaaggttttccgccgtatgatagcctgcatcggtttctttcagcgtaccgatcttttgatcgtcaggatcatattcctggttggcattggaatccgcatacaggtcgaacaccgcaccgggcaggaagcgcaggaaagaattcttgtctttcttatcctccttttccacaggggacggttcttccacagcttcggttttagtcacctgcacgctgccgcggatcagggtgttttccacacggatctcgatatgctgtccgtctgcaccgatatatacatggtgctgctgcgggcttactgtataaaggtcaggggcagagatctccttgacgatccagtgtccgtaaggaatattctcaaaggaaaaactgccgtcttttccggtaacagcagtaagcagtgcattttcttcggtaaattcttctgtatcaggtctaaacagtcccatgagcgcaccggccagagtgacatcttcaccgccttccgggttttccccaacttttacaccgtctacacgcccgcggagaagttcattggaaacagccccgccttcattgacaaggatctgtaccagtgcagtttcctgtccggcatattcaaagacgaccggatatttctgattcgaaaggatataggcgccgttggtcgtgcgttccttgacataatagctgccaaacggcagatcggaagcgaaggaagcactgtaaccgccggattcatcagacgaaacagagaccacttccagaagtccatctgccgggatcacgctgccatctgccgccgtcagatctgcggaagcataaagtccaaaggaaatatccttatattcctcgttcatgccaagaccgaacaggtcatcggtctccattgccttgaaaagtgtgacatccactttctgtcgtttgtcataaagacctgttgctgcctgtgtgacctccacggtctcacccgcataggtcagttccacatattccggttgaggattcagcacacaaccggaaggagcctgacgttcctccagacggtaacggccaagatagagaagcccgcttttcgctgtgccgtcctcgccggtcgtaagggtttccacaaccgtatctttttctgcccgcaaagtaccgtcaccggtataaatatcttcgtctgcgatcacgtcatagaccgctccgggaagcccggcaacctcatacaccggctggtacagtccgtcgttttcctggacagaagcaaatacttctccggtctttgtgatggtaagctggcctttctgcggcatattgtactgagtgaccgtcacaaccgcctcgctgccgtcaatggtaaacggtaccggctgatcggaaagcacatagccataaggggcagccacctcataaagttcataatccccggcggccaaaggctccggcagcatcagccagccctcgtcagaaacatagaaggtatccagtgtttccgggttcggatagtagactgtctgggtgataaattccccggtggaaagatccttgatctgaaaaccggttccggtcacagggataatctttccggtctctgcgtcacatttttcaactttcagacgggctgtgatggtgcggttgttcaggatatagctgtaagtctttccgtcagaggaaatgaataccgtaaagtccgggacaaaggctttgccttcctcgcctgcgatctgatggaccgtataatgcccataaggaagcggtttgctggaagcaaaaccatccgcatccgtggtaagaaggtcacgttcactttcctttgccgcgtcatagcttccggctgcctttaagtaaacttcaaagactgcgcctgcttccgggcgttcgatgataccggcattgggatcgtcggtattttcgccctcagacacatccgggtccaggtcatcggtgtgcttaacaagctggatatttccgtaaataaccgtttctgtcacctgattttctgtggtattgagttccacttcatacagggaaggggatgcacccacttcataaatagtttcattcagaagatacccggtgctcggttcgatctcccggatcgtccagccatccccgcatacataatagcgggtcataaagctgccatccggcccggtagtataagtgtcgatcagttcgccatcacggaagatcccataggtcgcccctgcaagagtggcatccccctgggcatttccggtgtcagcatcactctttaccacatggacgcggaacttcttcaggatattgctgaaatgtaccgaagaagtctgcccgctttcaatggtcacgtactgtgcggaaggggtcacatagcggtccgccggaagttcttttaccagataggttcccggcaggagcttcttttcaatctggccgttttctccggtcgtaacttcctcattgacttcatttcccaaaatgtccgtaccggagatatggaaggtgataccggaaacaatgccgtcctcactggtcttgacaagttttgcagtaccgtaagtttccgttttgatctttacaaagaaggaaaccggatcgctggcgccggtcatcatggtctggtagccgggtctgccccagatcagcatgtcgtttgccaccgggatattctttcggaattcaaacagcaccgggtccatcatcatctgcctgctggtaaaggtgtattcatttccgtttcttgtcacagaaacgccgctgcctttcaaagcctccaggtcgatcttcaagttgttggtatctgtgaccgtcagggtatagacctttttttctacatcccatttcagttccagttccggtgcttcgcttttcttagaagaagtaaaggaagggactgtggaatgggaagcaacctgtgccagaatccagtcataggctttttctgccggtcgtccggcaatcacgctgaaatactgatcggcgtctgcgtggccgtttccgtggcggctgtacggatcgcttctaagctgctgctggtattcccagaggatgatctgggtcgccatcttatagtcgtcctcgttgatcccggaaacagggagcgccgcaccgggtttccagccatagatcgcagtcagggtgatccccctccttgcctcggcaggaagcaggttcaggtattggctgttggtcccgctttccgaaacataggtgttttccgaagtatggtaaggaatcccgctctccacacagtaaacctggtggctgatcccgtcagagtccgtcagcatataatgccggtaagcattgcccccggaactggtgtgtacgtcgatggttccgtctgcatggtaggcaagataggtgtaaggcgccggggcgcggtagtggttcccatcagagcccacatactggtcgcccagccaggagcttgccgtctgtccgacagacatggcaaaagcctgagccggaagaagccccaaaatgcttgccatacaaagcaaaaacgccaacagcttgcgaaagccgcggcgtctggttatgatatgttccatgaaaaaatcctcactttcataaaatctaaaaggacagccttatttgctgtccttgtcgtcaaaatcatcctcggaaagatattccggttccccgtatgcctcatccgggtcaaagccttcgccataaccgtcatcctcaaattccgcatcgtcctcggcctgctgtttcggacgcacgatttttacatagtaaccgatcccaccgaccgcaagtaaggcagcaaggataaacaggatcgtgccgacgctgccggtttctttcttcggcttttccggttctgccggtttttcagtttccgccggcttttcttttcctttgcagccatttaagtcatttttgcagaccggacagccggtattaacctttcctgcctcacatttttctgtgcagttacagctttcttcctgagggatcatgctcatgctgccattgttcttttctgcaagcgccatcaggtcggactctgtgacgccgtttaagaagtagacattgttatcttcccgtttcccatcgatcaccagataaaaaacattgcccgcgtccgtagtgatggtgtaaaactgtttttccccatccgtaccgctgatgttgtcctgtaccgttccggtgccttccggggtaaatgcaccttcagggatcgcagaagtattttcctgctgtccggtactattatctgaaccagaggaatttccgccgccggaaggagttgtagcgtttgagccggaaggtttttcttccttaggcggttttgtctgtgtaccggacggactctggggtgctgccgcagcaggtttcttttcaggcgccgattctttgtaatacggattatccatctttaccgcatcagaacggtttcctgcataatcttttgcgtatatgcttacctgtttttctgttccggcataatctttcagtgcgaccgacgctttcccgtcggtgagggaattgatacggttttcatcaacaaagactgcctccacaccagagagatcgtcactgctttctattttcagggtatcgccctccagggaagcagtcagtgttggcggtgtggtgtctttggaaccgccggcatgagccgttacaggtaatgcgctgacacttacaagaagcgtaagcgccagcatcagggaaagttttttaagcctcatgcacatcctccttctcctgcggtaaaacagtttccgaaggggccgcctgctgtgatttcaaaaaatccgcaagctgctggggcgtcagtttgaaactgcgcgccaccgccacataatcggtattttccaactccgttttctgttcctccagcttatggagctttgcctgcatttccgcaatctttgttttggtcttttcaatttccttttccagtttttcaattttaggattcaatttattacctccaatctgttaaggcagacgcccaaatgtataaaaatgctgctgccagtagcttgtattgatgttggcataagagatcgggtctccgcagtggatcatcattccatttcctacatagatccctacatggcttgcaccgctggtattgtaggtcccctggaagaagatcaggtcgcccggttttgcatctgcgcttgataccggcgtacatacacctaaaagaccgtccgcagtcagccttccaaaattccagccgacgccgcagttgttgatcacccaggacacatagccggaacagtcaaaggaagtggaagggcttgcgcctccccatacatacggatagccaagatatttttccgcctcggccatcattgcggcaaactgttcatccgcaagggcttccggtggaatgtcataatcgaagtagtttcctgtgccgcctgaaccaacttccggcaggtgccgttcgctggtatcgccggtatcagcaaaatacaggggattcaaatactggccgtcaaccagaacttctaagtgcaggtggggaccggtggaatttccggtattcccgacctttgcgatcacatccccggctttgacctcctgcccggcagaaacaaggatctgggaacagtgcccgtatttggtcgtcagggtatgtccttcgtatgcctcgccttcaatggcgacacataagccataaccgccggcatttcccgcaagggtgaccgttccgtcatgcccggcaaggatctctgtgccctccggcatcccgatgtccacaccggtgtgatagttcttttccccactgatgggatgtacccggtagccgtagtagctggtcacataagggagccagttggtgccaaagacatttttgacatactggcggtttccttttgtctgcagcaggatctcgcagatctctttctggtctgcgttcatccgggaaacgaccaggttttccaaaggtgtgaccgtgagcttgacatttaagatgcgccattcataaggcacttcctcctgggtttcttccccggtttccgggtcaacggaagtttctgtgcgataacggatctcggtttcttctgaaaaggacagggtatattgttcctggaaaagctgccgcagcacgctttccacttcatcgtaagtaaatccctgataagcagaagtcagataccccatcagcacatacgggtcatgctcgatcgcacccaggttataccggtattcgtcatagccggggcggtctgattccaccctgtctatttccatttgcaaatctgtttcccactcggtataggtaagctccgcctgattgatgtcctgatcgtctgcgagataggtagaagcagccagacttcccagaccaccggttccaatattggagaatgtggaaaacagggacatgatcaggaaaattaccaaaaggagaagcaggaggacaaggcagatcacagggtgccgtttgaccgcatggacaataccgacgctgaccctctctgttgcgactgcggcattttttgcctgtttcccggcttcatgggcagccttggcatactgccttttcagtttttgtttctgccatatccgggcaatcgcatgtttcttcagctccgggtggtcgctaagagcctgccggtaagcaagtcttgcgttggcctttgctgattttttctgtaatttcgctgcctttcggtagggggcagttttatgccggtgatatgccgtgcgaagccccgcctcgcccacaagttcagagcggtgggctgccttgatccccacattttcatcctctgcatcataaatctttttatgagcgtaaccaatagcagtattggcgcccgccttgaccggacgcaggggtacaggtccttttacatgggccttttgggatttaacctccttttcaaattttaagtgttttttggcttttccggtctccgggtcggaaaccgtctccatgcgcagtttcttccgggccggcagacgattttgcgcctgctctgctttttgtgcagtccgttccgccttccgtcttgcatgggtgagctttttatcctttgtctccggcggcagttcatccgcagtaaattccagcttggatgttttcggcggttcgctatccacacccttttccttttgtgctgcctgttcctccgcctgtgccgcttcctgaaaacgctgctgatatttgttcccatgctgatgtgtccggtaacgatgttcctgaccggatctgtctgtgccgctcggtggggctgttccttcagaagaaggtgcatattgtccggtatcatggtctgtcacatcctctgttacaagagaacgcctggaaacctcctgccggaaattgcttcgcccgttttcctgtatcgggggctctatcctggcagcctccggcgtctcaaagtgatccgaaaaaacatccaaagcggctgcataagcctcgccctgttccagcaaggacgccggtgtttccggtgatagctgggaaaattccgtctgtacagggatgtcctgcctgtggggtttgccgatgacagaagaaggggtgtcccgtgccctgcgcaggtcaaaatcctgttcggtctgcctggctgccggttgatcttccccgtgggaatcacgcaccggcatccgggtatctttgcgcttcctttgaaattccctgtcgtgtgccattgttctcacctccgatccattttaatttttgtctcacgctttggtccccgctacttcatccggtcttgtggtaagcacgctgtacaacagtgtgtccttcgggaagtggtccacaaaggggatgatcacatttccaaagaacaaaagcccctcgccgggaccggaatgggtcacataggaaagctggtgcggggaaatccccaactgctttgccaaaatctgacggtctccctgggcctggttgagcatatagataaagtccgagttctcaaaaatgttctcgatctcacgggaagccagaaggtccttgacgttctgcgttaaacctgatgggattccgccccatttacggaagcgtttccagatctccacgctgaaacttcctgtctgccctttcaaaagaaggtggaattcgtcaatatagaaccaggttgttttatgtttggaacggttggccgtgacacggttccacaccgcatcctgcatgatcaaaagcccgatttcctttaaggcttttcccagtgatttaagctggaaacacagtacccggtgttgatccatctggatattggaacggtggttgaacacattaagggagccattgacatagatttccagcgccgttgcgatattctgtgcctccggttcagactgtttcaaaagcagctcgtaaagatcgcctaagatcggcatattttccgggcatgggttctgcaggtattcccggtacaccagtctggtacaacggtcgatgatcgtcctttcgataggggaaagcccttctttgcccccgatgataaggtcacacagcgacaggataaaatcacttttcaaagtgatcgggttttcatcatcggaatagtccagattgatgtccatagggttgatgtagttcgtggaagtaggggaaatatcaatgacctgcccctgggaaccgaactgctgtaccagcggcccatactcattttccgggtcagcgataatgatgtcgtcctccgtcagaaggaacacattgacgatctcacgcttggcagagaaagatttgccgcttcctggggtaccgagaaacagcccattggggtttttcagcgtttttctgttcgccatgatcaggttattggaaagggcgttcagaccataatacaacgcctcgccctcctggaacagttcacaggtggtaaacggtacaaagatcgctgtgctgctggtcgtaagcccacgctcaatttcaatctggttcgtaccaagagcaagcgaggacataagcccctgttcctgctggtaatccagccgttttaaggcacagttgtatttctgtgccacacccgaagcggcaaaaatatcattgaacagcttttggcgtttggctgcgatattttccaccagtaccgtcacaaggaacatgcgctcattgcggctctgtaaatcctgcaaaagattttttgcttcctctccataggtggcaaggtcggtgggaatgatgtccatgtcatacccggatcggaccgctttcttttgttcctcaatggtcattttctgcaggtccgacattttacgcttgatgtttcggatcgcctgtgcctggtcgatagactggatatgcaggttgacggtcacggcgtcgtttaagtcaagaagatccgctaaaagccggtcggtaagctccggcgccaaaatctgcaaaaaggagacagcaccggaatgatcgcctacccggaatgtctttccatcctttgaaaaagacagcccggatggtgaaatgaagtctttggtagaaagaccggtcttaggcagatctgaccactggaaatgaaacttttcctgaccgtccgggtgaagctggctgtgaagaagctccaaacgttccagtccgtttaaggatcttgcctggactccaagggtcttgaaatttgccagcacatccgtttcaatgcgttccagacgcattttcgcagtacgcaggtcatccgcctcgatcccaaaggtaatgtatttgcgtttggtgagaccattatttcctttctgcaactggttctttaacatatccccgtattccttgcggattccgtcatactcgtcgccgcggggagggatgtcaatgcttctggtaaaatcctgcatattggcccgctggttgataaaggtaagctgcacatggatcgaggcatcgaagtaatttaagaaatcgcagtagccctcgaagatctgtgctttatcatctgcctgtgcaagctgatagttaatatcaaaaaactgtaccgttttggtgtaaagggtatcggtcagccggcagatcccatcccggtacatctcacggtagggaatgctctgctggaccgtctgcggggcatctgctttcagcccggcaaaaaagccgccttttttagacggcttggaacgggcagacttagttttgccctgctttgcatcggctctggtctttttggcctgcctgatatttttttgcagacgcttttcctgagcttcctgctgcttgttttttggcaatctttgtaacctccttctttgacatagatttatacaggttatccgtcctgtacggacggtccttcggccagagcttataacggagccggttctttaagatcttttctgccggctgcccgtcacgctcatacatagcgaagaagaaaaagggcatcatcagcccaatcatcaaaagtacagccgccgaattgccgatcgccccgcgggtaaagaaatacaccggaaggccgacaagcccggcaaggctgaaacaaataagctggcgcttcgtcagattgaaggccagcttggtcttaactttggttaaatcctttggtacaggtacataaggcacttaaaatcacccctttcgctccggcatagtcagcgtacagttcacttcattaccccatacatcccaaccgggtgtcttttgtcttgcaaacagttccactctgggctgatcgcccatgagttttacgatcttatcccgcacctcgtccggtttcttgctgtgctgctcaatatgggagatcacaaactggtggattccagcacactggcgtttcggacggcctctggttgccagcaggcagacctccgcgtttgagcgagtccaaaagcccatgccataaaaccagctatccgctttccggttctgtttgagccatagaaaagccagcgttttatatttgaacccccaggcgtcgatcacccggaaggcttcattaagctgtgggaaggttgcccacagaaaaagggcgctgtcttttgcggcaagctccgataccggcagggcacagatttcttcaatgctcatcgtgggataatggttttccgcaacgccgcttccatgtttcctgtcatagcgccagggcggatcagcatagataatgccgtactgtttcgtttccggcattagcgagcctgctcattcttagatggggctggtttggccggctgttctttgaccttgccggcattttccttcaatgcaccggtcagggaaggcttttccgcagctccctttgtcgcttcaagagtcgcctgcaaattttcaatagcctgcccgtacccatcaatgagagcatcgttgagctgcttgcggaactctgccgtaaccggccagcagacatctttccagttgcctcccttatcctgggttgcgggcatattgacatacagccccttttcactggaacagatacggaaaccgtcgatcttaaagcatccgccaatcgtaacattggcaaacgccagcaggtttcccattggagcgatcggacgcacgcggacatccagcttcatgccgtttgccatttccggcgtctgtgtctccggcgccattttttctgtattggttttactcatatataaaatcctcctttttagaattggttttgttcatgctatcttgcattaaatatggatttggataacgaacctgtcttaaacagggcaaaggccagcagtaccgtatagcccgccgttccccagatcgcaccgtgcacgtcgccggacgatgggatagactggaccagcactgcataaatggcaacacagatcaggatcaaaaaaccctgaaagcctagggcaaaaagggaacgcagatacccggttcccatttgtccccattcccgatttgccattgtggaaaacgggatcggtgcaaggctcacggttaaataaatctcgatcatacggccatatacaatgacaaagatcacgatggacagtacccacatacacagattgatgatgttggtttccagccacagtccaatcagttcccacattcccattgcttcaagctgggtttccagatcagacaacgccgcctgcacatccaggttcccgtttatgacaccggcactttgcgacaccacattttgggccacatcaaagaccgccatcacaatcgtaaaacagttggtgagcaggtaagtggcaacaaaagtcttgaaaatccacttgaagatgttgaatgtatcgaattcgtgcatgttattcttttcgagaatcatctggatcagttcatacaccagaacaaaggtcaggatcatgcccgcaatgggaatgacgacggtttccgaaagattctggatcatggagaacacgccgccattccagccctgtggggtctgtcctacctgatttgccacatccgcaacctgattgttgacggagttgaaaatgctggtgtactgtccggtgatcgcatcgatcaggccctctttaatccagtctgttatccattcaaacagactgcccataagtcagcccttaaccgaacagaccggaaagcagcgggatcagcgttgcaccaaccagagcgatacctccgcctgccataagctgttttatccccaattaggtgtaaaactctgctcgatggcgggcggcggcgtacaaaaaatctatatggtgtttttaagagaaccgtcccggcgggacaggtcaggcagtgacctgttccacctccgggatgggtttgagattaaaatgaatttcgatagaaatgtgtcttgttttatcttcgtctatgcgctcatgcacgacgatttctttgattaagcggttgagggtggctgcgtccagctctgtgatgttggcgtattcctgaatggcttccacccattgttttgcgtcattggcaagctggacttcatcggacagccgctttctgccctcggacacttttgctttaagctccgtctgctcggtctgtgtcttttccagcatggtgttgaaattctgctcactgatacgccctgcaatcatatcctcataaagccgcatgaccattttgtccagaacctcaatccgttcctcgtcccttgtaagggagcgttccattgcttcccgctgttcccgctgctctgcttcacaggtattggtcaggcggtcggcaaccgcttccccgtccatcagggcagctctggcacattcccggattttccgcagcacatggctgtaaagggtgtcatagtcaatccggtgctgggtgcagtggttctttccaaaggcgttgtaggtcttgcaggaataaatccgctggggatgttttgcgtttgtgtagcgtaccgtcagcgacttcccacactcgccgcattttatcaatccggcaaacaggctgatttcattggtctgccccggacgctggcgggatttcagcttgttctgcacaatgtcaaagctcatgcggtcaatcagcggttcatgctgtccctccaccacaatccagtcctccggcttcttttccccaatcgtgccgattttgaaacggtagtcttttttctgggaagcaatcgccccggtgtagacgggattcatcaaaaggtctttgataacggagaagtcccacatataccgtcctttttctgggtctttcttttcccatttggtgcgggtattgcgaagcccccgttcccggttccaccatgtagggcaggggattttttcttcctccagccgtctgcggatatagttcggaccatgaccgttcagggcatatccgaaaatcagtcgcacaatcggggcggtttcctcgtcaatgagcagatggtttttgtcctccgggtctttccgatacccaaacggggcaagacacccggtaaactgtcctttctgcgctttcagaagataagaggaatggactttcttggaaatatccttgctgtacatctcgttcaggatattcttgaacggggcaatatcgttgttatcccgcagggtgtcgataccgtcattcatggcgatatagcggacaccgtttcttgggaaaaagtcctcaatcaaatgcccggtttgcagatagttacgccccagtcggctgaggtctttcgtgatgacaaggttgatttgcctgcgctcaatggctctcaacattctctgtaaatcaggacgctccatattaagacctgtgaagccatcgtcctgatagactgccacaacctcccatccctgcttttcgcagtatttttccagcatatcacgctggtttgcgatactggcactttcgccttgcaggtcatcgtcctttgacagtctgcaatagaccgctgcacgataacccccggcaagtgccgaaccgattgttctgtattccatttcgttcatcatagccatttacccacacaatccagacggtatctggctcttttgaacctcatcttcattatacttcaaatctttctttttagcaagatattcttttgaatttgtctttccatatttctgggaaatcaggctgacgaacacatcggttgcgtcaagctccccgtcaaacacagtagtcacatgaatctctgttttgttttttgccataggcagttatcctccatacatgaaaatagccagacagagggtgtcggcaacgaagtccggcaacgggcttcaaaagaccttgcaaacaatctcaatctggcgatgattactatttatacttttcttttatttttctgttgttttggttgttataagggagaaaagcccggaaataaggggttttccccggcaaccggctcggcaacgggatagcaacagggggtgcaacgggctgtcattttcagaatggaagctccatctgttctgtgacctccacaaagccatccattgctttttcagacgggttgcataagtccgttgccgggttttcacgctcccagcccttttgtctgccgtattcggaaaacattcttggattcgggaagtaccgccagcggtcaatgcattggttcataatctcgttgatttcccgtatttcccattgcttcggctcgtcaaaggcatggttcaaagcttccttgtagagctgcttggagcagaccatgctcccggtgtacctatcaagatacgcctgtatcattccggctttggtgtcctccggcataaaatcccgctggtgttctttgagataccgctgcatgtcggggctgaaagccagcttgaacctgccgcttcggtaaatctccatcgcttccgcccacatctgctcgatataggctctggaagcagcttcgtcctccaaaatgtgaacctcggcttgctccgggtacaccatgacggggataaagcggcggttgccggaacggtcaaggggaagaaaatcaagggcattggaagtgccgccaaacacgcactgacgggggcggtctgccgggtgggtttcatagggtatcttgtaaacctctttctgccggcttaaaaatgacttgatttcctcaatgctcttggcgttggcggttgccatcatttccgacatttcgataatccagtgaccttgcagcttgcggtacacattgtcatcgtccaacttccgcaaatcatcggagaaccactcgtcccggactgccagcagacggaagaaggtggacttgccagccccctgaccgcctaccagacagagcatgatttcaaatttgcatcccggctgaaaggctcgtgagattgcacccagcaggaacagcttcaacgcttcataggtgtaatcgtctgcgtcagcccccagaaagtgccgcaggcagaaacggattcgctctgtcccgtcccacacaagggtacttaaatagtcccggatgggatggtacttgttttcattcgccacaatcccgatggcgttatcaatctttttctcattggtaagcccgtaggtttcttccagataaagaagcagatacttcatgtccgtatcgttcagggctgtgctttccctgtggaagccgatgggctttatgatgtccttgcggtcggtcaggatgttgtatgcgatagccccggaaagcagcgggtcacgctggaatacggtcaggcagttccgtatgctctgacggacaccgcctttctcggtagtttccagccccgccttgatttcaggggcgctctgtggcggctgcatggcgttcatggtgttttttagttcttgctgcgtctgcggctgcaagctctgccattcgctgttcaagctgtatcacatcctttccgtagtccgtaatcaaagccgctttttcctctgtttccccgaacagcagcacatccagcagatattccacttggtcttgcttctgtaaggcttccacaaaccggggatgaaagatttcctctggggagtgcggggcatattcctttctccacactcggagtaggtggagataatcggcaaggatacggaagcaatggttttttgcttcctgaaactgttcctccggggatttctgccgggacttgggcttttttgcctttcccggcggtttccagtcctcataggaaagcccgaagtcctgtgccagttgtacggcggcttctttctttcccagcccatacagggcggcggcaaaatcaatcacatccccatccgcaccgcagccgaagcagtggtaacgccgatccagcttcatgcttggggttttatcgttatggaacggacagcaagccatcccgttccgacctacatggattccataatgctccgcagcctgtcttgttgtgacggactgcttcacagcttcaaatacattcaaatctgtccctccttgaaaataagaaaagcacctgacattctctgattgaaaatggcaagtgcctgttaaagttccatatcctgttgtttgtgtttcgtctgtgccgggacagttctttgtgcttttttctcgtctgccttatcctgcaagacttctttgatgggctgcttcttgggcggctctttgctttcttctgtgccgggggtggctttccgtacccagtagcggatgtcccgcagcttcttcaaatcctcctgtacctcggtcagtggtactttcagctctgcaatttcttccagaagtttttcctgctcctcttgcagctccttttgggtactgtccttatcgtctgggtgcttggcaaggtaggcggcggctttcgcataccgggcaacctccgggtgttcctgtttgaatttctcctttgttttcttaaaaaatatcttctggtacttctcatagacaggcttacattccttgcaggctgtctggctggcaagaatcccgtcaatcactttgctgcgggcttcctttggcttcatctgattgcggtaatctgcggctgatttcccggaagattccagaaatgcttctaagtcctccacagtggaaagccccttttgccgaagataggacagggcttcgctgactgcctttaagtcctgtgaagtcccccggttctgtccagcccttgtccagtccttccgttcttcctttcgtatctccatgtacttcatcagcagattgggaagaagtgtcgcttcctccgccgccttttgtgcaagcagctctttccgtttttctcccagctcggtaatccagcctttgaggttttggataagctgccggatggacttcatcagactgttggcggctctgatttcccggttcaggtttccgatattcgtctggataccacgcttttccatctgccggacagcagccccctcatggacagtggggacaatatcaagcccctgtctggcataggaacgcaagtccacacgctccggacggtcattggcttccagatagcggttctggatgacctcccattcatgccgccagatttcgcaatacttctggtcgttccaatccaccgtatcctccttgtggcttttccatctgccggacggaagttttatccgttccccgttttcgtcaaggtcataaaccttgcggctcttgggaagccattttccatgttcgtccattgccctcatagtgagcatgacatgggcgtggggattgtgtcccggcggatgggggtcatggatggcaaagtcagcaatcatgcctttggaaacaaactgcttctggcaaaactcccggacaaggacagcatactggtcgggcggtatctctctggggatggtaagcacccaccgccttgcaagctgggagttccattgtttttccaccgcttcggcggcgttccacaaagtattgcggtctgcatattcctgtggggcattaggtgggagcaggatttcattgtggacgataccacgcttttccgggtagtgcttcacttgctggtcatattcacagaacagtttttcgccactctggtaagcagcggcggcaaccgcagactgccgctggctgcgctgaacaatcgtgatttcgttgtgtggacagggcatttcgtgtccctcctttcgctaattggtggacggggtggcgttttaccacctcattttgggcagaaaaaaagcaggaaacctttctttcagatttcctgctcggtgtgccgctgtgtgggcggcgggtatttagttgtaaaagttcgggacaagttgacccgatgtgaagctgacgaactggaatttatttgttgttattttctatcaatccccaaaacatcatagtattcatcactatactcaatgccactattgtcaaagcgagattgcagttcttttacatagtcataagggttatcaataggggaaatttctaattctgtttcaagataacttaatgtcgctttctgttcctctgtgcggattgcttcttcctctttgaggtgtttttcaaatttgtctttgtccatccaaataatctgctcaataggattagtagaaccacaagcaagaataagtctcataaaatcctcaaaggttcttgccagtggataaacaaaaacatctgcacaagtatcaggattgcaggcaaaaaccatttccccatacggctcaataaagcaatacataatacttccttcaaaacctattgcctttgcattggtcggatagcagaagtaagaataaatatcttcaacttgttcaagacaaatcaaagagccatttatattcagttctttgtattggtcaaaaagtgtttccattttatcacactcctttacaacttctaatttttcagttctacaagttggaagttgtcgctatgaaatttctttttcatcatctcttggtggtcggacataacataacatttctttttcacaagcaccaaattttgagaaattggatttcgcttcttttagcgttattccatgattagagtcgcttggttcgttatcagaagcaatgaacgggtcattctcccaaaaacaaacggggcaaatatacccacaatcttcatttgccggaacattataggtaaaatatccgcagcaaggacattggtattttttcatataaacctcacgtttaagccttgacctcaaattcctgatttatttctgactttattatacttcatcgactatcgaaaagatagcatattttatgaaacttgtcggctgggaacagcttgcaccgcaaggtgtccccaacaggcaagtccacaaaagggtagctggctgcagccagcgcaggggaagtgtagcgtcccctgtttgatttggagcagaccatgactgcggaaaatcacagctctccggcgaggagccttcggagaacgcaatgcgccaacctctgggtggtgtataattgcgcccttagtaaactaaggggtttccggcttctcccgttccagcagttttttcaatagttcctgcgtgtcctgcctgtgaaaaatgagtttcaacaacagcatgacatcatcatctgtcaggcgttccggctcttgcagaaaactttccagcataccgccacgagtacagagccggtgcgtccgttcctttcgggtaagctgctttaactggtgctgcaatgccttttcatcattgatggctttccgcagtttcttttcgcttttctccaactcccgattgagtttttccagctttgaggtatcaggcaagggcagcgtcctcctttcccggtatcagcacataaatcctgtttggttctccaacgccctgacgcacccgcatgataagtccggcgttttccagttcattcaaagaacgcttgaccgtcatagagctgcgggacaggactgcggcaatggctgtgacagggaagcagacaaacaggattccgttctcgtcctcctgcccattggagagcatagcgtccaacatccggcagtacatgatctttgcggtgctgctgactggaaaccctgtcaacgctcttggaaaagccatacagggcggcaatggtgtgtctatcgtcataaattcaaaaatcattcggtgtgttcctcctttttctttgctcgtttggataaataacgggggcagtcaatcacaaccgcccggaagctctgcttgcacccatgctggcatttccggcataattcgttgtaagtgacacgcccccggtcattgaggtaaaaagaaagctcatgcttcctctttttgctcattctcggcatattgcgcttcctcccgttttcgtgtatggtttcggggcgattttcggcaaaattacagccatagagccgcctaaaatctcccgaagtatcagagatagggtagactatccccctatcagattgtcgtgtttcggtatcatttcggtgtcagttcgccagttctccccggtgtcgttcctcccctgaatctcacagcggcgtatcgctccctttggtatgctcgttttggtcagggttcctccatatccctgccaaaagtcatggcactacatcgccggggaagcatatcccacacaggctggtcattcgattggaataatccatcgatgaactacctgtatcatagaacatttttgtgccctgtgccgtatgtccacaaagtaggaattcggggtaaaaatcagaaatttccacgattgcggaattgatatggtataatcaattcaacggttataaatgtcgttagaaagggggaactgcttcaatgaacggagctactacaatacaggaacggctaaaagatttacgattaaacaaaggattaaaactggaagaactggctgagcaaacgggtatttcaaaatcggctcttggcagttatgaaaaagacgactataaggaaatcaatcatggcaaccttatcctgctggcagatttttatgggatgtccctcgattatctcttttgccggacagagaaccgggcggagatcaacacgccattaagggagctgcatttgagtgatgagatggtagcacttctgaaaagcggtcggattaacaaccgtctgctgtgcgaacttgccacccataaggactttatcaagtttcttgcggacattgagatttatgtggatgggattgccaccatgcagattcaaaacctcaacgcccttgtcgataccgtccggcatgaaatcattgaacggtatcgccccggcgaagatgacccccatttgaaagtgttgcaagccgcccatatcagtgatgatgaatatttcagtcacatggtacgggatgacctcaacctgattatccgggatattcgggaagcccataaaaaggacagcgagagtgcacctcagaccaccgttgccgatgaactgaaagaaaatctggaagcggttgaaaatttcaagggcagccgtgatgaaaagctggttgtcctttactgtaagcagcttggtatcaactataaaaatctgtcagatgaagaatttcgctggctgattcggattctcaaaaaatcaaagaaaatgggaacgcctatcagccagaggaaaaaacgataaagaaaaaccgctgttgcatggtttgttggcttccatgtagcagcggtttttgctgggattattcagttgaatttttagcacgacaaattagaatttgtcaaagaggattattccaatattccacagtatttctatttacatcataaaaagtaatattacccgcatttataggcaagacaatcgcaaaaggtttattgcggtcaatatcaaccacttgaattgtgttgccatcatctatttcaagttgttgcacctgctgttgattcatagaaataaatgctcgttcattatatccctctacagtaaactccacaattcctctttgaatccccgaaagagttccacctccacggaaaaaatatccgaaggaaagtcctggacgattgacatagacggaaaaagaatggtcactcaaatcctgagggtaagaaatatatgcagccatcgtgctggaaacgcttccatcgaccgtccaatcatccttaatcttctgcgacgaacgaatatctgcctccagcttagatgaagtcacgccgatctcattgttcgtataaagaaaacaaacaaataaaatacaagcaagaacaacccctatcacaattttaagaaatatttttttcacgctatcaaaactccttgtcaactttcgatttgtcataatcattctaccataccgttatgaataaatcatctcttgcaaaataatttcttctgcccggttgtgaatgttattgcaacgctgcacccattccatttgatgggtacgcttcaattcctcggtcacaccatcggcagccttcatctgctccatgatggtgtctaaccgttcctgtgcctgttcgttcaggtctgcaagatatgtccataactccccggtcagtgtcaatgtgttcaatctggctgggtgggcttctcttaaatattcccggtgcatccgtccgtactttccgatagggcggtgttcctccggcagcttcaaatctgggatatagtaatctccgacaaggatataatcaattccgttttccgttattcttggtttcaattcgctcatgttccttacctcctgtggaagcaggctcgtctggtactaactcaatcacatcggtaatctcacaattcagcgtttcgcagatacgggctaatgtatccatgctgatgtgctttccctctttgctcatgttggcaatcatattcgttgtcataccggcggcaagccttaaatcttcttttctcatatcacgctctaacagtgtatgccagagtggtttatagctgatgtgcatattgttttcctgcctttctatccataccaccggggcggctgccccggcaggaacttttctcttattataacaccaatcttgtgtaatcacaatttattcttgtatcctgccgctgataccgtctggattgtgcttttcctttctttttgttccctttaattagccataaactgcttgattccctgggattttgcacctgggttatcatttccgtaaccttcgagaaggtttacaacaccccatgcgcccagacctgcgcccagggcgatcacaaggatcttcaaagtatcaatcgcgcttgcaaaaaatgccatatagttcctcctttaatttcagaaattttaatttgtgatatagccgtatcaggccggaaacaaaaaagccgccgcactgtttttagaaaaaatctgtttcaaacagcacggcggcatggggcaggaagaatcctgcggttatttacttttcagggagaatcacgaatcctcaaaaaatcctcctttcatcgtgacaaaaacaaagcctgccggggcatcatgctttgacaggcaggaacaactctataaagtctgggaagccagatcttcggctgtgacttcataattacggtatcgttcaccgggacgcatcggcatccgggtagaaagaaacttttcgatattaaaagcattcttctcattaaaatcggaaagcagtttgtaatttgggtgtttggttatatcatatttccgggagaggaacggccgcacacccctgatctgcagcagacatttacccccgtccatgaccgccagttcatccaccgacatcagatcctttcccagcttttgaaaattttgtccgtgggattcctgattgccctttgtgacactggtgttatacaggtcgatggtctctttccccaatagggagttccagctttttaaggtggtttcttctttacctcctaagaaaagggaggcgtcacagttaccgatgatggtgtccatgttgtctttatacagggctttgagctggctttgcgcctgcaacaccaggcaggcagagatctcacggcttcggatggtcgccataagacgttccagattcggaatctgcccgatatttgccgcctcgtcgatcaggcagcgcacatggatgggaagcctgcccccatacacatcatccgcccgctcgcacaagcggttaaacaaaatggaatagatcagactgatcaaaaatgcaaaggttccgtccgtatcactcataataaggaaaagagcagtccgttcatctcccagcatatccagatccagttcgtcatacatggtaatttccctgacttctttaatgtcaaaaggagccagtctggaagcacaggaaataaggatcgacttcgctgtttttccggcagcgagcttatatttcttatattgacgcagggcaaaatgatccgggtctttctgttccagcgcgtcaaagagaaggtcaacggcatttttgaacgactcatcatcctcacggacttccattgcgttcagcatttctaccagtgtggcaaaattctgttcgtttgccggagcctcataatagatatatccgatcagtgccgtatagagcagggtctctgccttgacccagaaatcgtctccggcttttccttcgcctttggtattggcaatcagagttgtgacgatcttcaaaatatctttctcggaatgaatgtaggcgaatgggttaaagtgcatacttttctggaaattgatcgtattgaatacccgtattttatagggatcatagatgatctttcctttttcattacgcacaggctttccgtcgttgtccagctttggtgtgcctcgctgcaacatctttccgcattccacaaggactgtacctttcggatcggtgacgacgtaggaactgtgcatttgcatcagattgggcttgatgaaaaagcgcgtttttcccgaacctgatcctccgactaccagtacatttttatttcttgcattggccggatttttgggccttccgtttaacatcagtccttcactttgggtaagaatgatattgttttccggctttgggtccataaacggggcaatatcggctttatttccccaacgggctgaaccgtattccacattttttcggtatttcttagcgtctttccctctaagatagactgccagccgcataatggctgcaccgcataaaccgatcagccagtccattgccgcccccggccacatactctgaaacgcaagggcaaagccttcggacagtcctaacagcttttgagaagcgtccgctccgggagccagacgcaccgcctcgcccagcttggcaaataccagaaggaacagaacataaggcagatggagaatgacctgttttttcaatgtttctgcatcgatcttcatcgttccggtcctccgtgttctttgttctttacacggtcacggccaagcgactgcgccagttctttgaacttatgaagctgtgtaagcagcgacggtctagtgctgcgtgtaaggtctttcttcgtatattccttaaaagctgccgtcagtgcatccgcctggtttgccttgaaatataccgtccattttgggggatcggtcccaagttccttttctatatggtagcgtacctgatgtttcctggcataccgttcaaaagagcggattcgccctgaaacttcaatggtattggctccggggtctttataagtcagccgcttcatgctgttgcgcccgacttttggcattgtgcgttcctgttccatcttttggagtaccgcagcaatagccgcacgcagtacccgccctgacagttttgctgcctgtatagaaacagaaaccgttcgttgttcgagatcttcctgcaagagcatcctcctttctgataaaatcggtatttataatatggaaataactttttaccggctttccccaagaacctgctgtcgggaagcgtgttcaaaggcttttgctgcctgatcgacctgaattttagcgtgtttcaaaagcgtcttgatgatcgtagccgggcgttcctgttcctccagatgatcgaccatccctttgcactcatccgggaggtattccgtcatatctttcaacacatcggaaaagttacccataaagccccagcagctatccgacagctccccgtttttataaagctcaaacccataacattcgccacgcagataggaatcgtaagcagcgacttcgctgcgcatcagtgcgtctgctttctgacggatagcaccggtcatcttgtcagcgtcaaattcctttagggcatcttctttggaaacatagatccagccgacctgtccgctgtcccattctgcatgaggagccctgcctgagaaactttctgtactcatggcaagaccggagtggtcgtagagatagagggggagcatcagatacttttccgaaattactttctgcattgcttcatcgatcgcccgttcctctgtctttggtccatgccggaaacggctgcttacaatgtttaccatccgttcatagcgtttcatgccggcttcatcatgtcctacggtatctaaatacatttcccgcaggaagtcatctttgtccatatagttgtgatggtcgcccagtgcatagcggggatggaagcataccatcgtcccaaaatgttcatctacctcacggggagagatcagaatatcgtccggctgcaccataagggcataaggttcatttactgccattaacataattggctcctttctttctacaaatccgggccggaatggtgcatcatcggtttttcccggtgttcattggttgcaggctgcttgactgcaatgatctcgccggcaatccttgcaaatttttcagggtacttgaactgctccccgtatttctccatcaagtccggggaaaggtctgtaaaatcttcctcgccaagaccaacgatcagaaaattcccggacacaatatcatagatgtggccgtcatcgtcaaagagagcccggttcagaggcagccccatcagcttgccttcttcattacagatcagagccaccgggtcctcatacggatagaccgcctgaatatctccgcccactgccgcctgcaaggatttcagaccactttcgatctccgcagcataaggggacttgcccggctctaccattaacactttcataattgtatatcctccttctttttcattgccgtaccgggatcggttggcgttttttcctgagtttttgccacagagagcttttcaaggacagaagaacgtccttcattaaacatggatagctgaccgtccgctgcctcacgaagttcagaaacagagaggggaagcgttacatcagcatgggtcaatagctgttcccgtttcaaatcctgaatgatctcgtcaaaaacggcgttgatcgcacggcgttcttcccccacagggaaggctttcaatacctccatttctccgtctttaccggaaaccagggtaagggcacagtcggcatggcctgccagataatccgatgtgtagggcagtttgtccttgatataacaggcaaaggctctggctgtcatttccacattgctgtcccaataaccgccgtctttttcacattcttttcccatgcgtactgaattacggtaaaaatcagtttccgtccgtccaatctgcggagcttcctgcgcctgcatcccggaaagcatacgctcaaaaatttccagccgttcccgttcacttttgggaattacccggccggtaacattcttcttaaatgcgttgatctgttccacagagccgggttcgccggacaaaaatgcttcccgcaagactgcgtaggtttccatctgttcctcattgccataccgtttcagggaggcaagaaccgaggaatccagccagcttgccgcatttttccgggtgcgttctgtttgtgcttccgtgcgctttgctgcctgttccggtgtttccggtttatacttcatggtgtcaatgagtttttggaacggcgcatagaggcggggctgttctgacagcatcccttttgcgcccatctttgtaccaagataatcgtcaaatccatgccaccattcatgtgccagcgaaccggccccgtgcattttcgtaagattgatgactgtacgcaaaggttcataatgagccgcagcattgccgctgcctcttgcaccaaaagcgatagcaagcgttccctgataagcaatatctttatcgctgatcttaagggctgacgccagatcctttagtgcttcaaatcccatgttaagggaggtctgacggtcgttctggttcatccagtttccaaactcgccgccgcggaacccaaatgtatcaagataatgctgtccggtgatctccacaccattccggtaatccggcccggtacgtttgacatgggcgagctggggagggacaaaccggatctttccgtttttgttcctgcctttggcaagttcctgcacccatttcagggcagcttctttggtctcaaaattggtccgcagaatcgaatagccttttgtcacatagtaggtaccgggtttccagtcctcatttttagaataggtatgtttcccgtcgttgaagtggatcgcataacctttcggtattttctgctctttggaaacacaaaactgttccttttttgctttctgagtaaagttgcgctcaaaatattcagccgagcggatcagcatggtattggacaatttgtttgtgatcacaggattgtcctgtccctttttcgttgcccggtaatggattccgcttccccagccctgtaccttttctaaatatccattgtcaacgaaaaagcggtcataggctctcacagcatcctccacagtacggacatctgaaagcactgtctgcaattcccggactgtttttatatattccttttgtctcgcggtccgtttttccggggtgtcatccatgcggtaatattgaggggaagcgtttaagccgtcccttgcttttttaataaaatagaccacgccaagaggaatcccttcctccagcatggctgcatagtccggctttttccagacattatcctttttcacaaatttttcggcttcgcgctcattcatggcttccagatcatctgcatacagcccgcggtctttccacaggtcttttttcgcaccgccgatcttttcgccgaaatcttcatgcactcctgccaatcttcatcacctccagtcagtgtaaaattcttatcgctccggggcagggcggcgttcttcgtttttgtgaagttgtgggaggtttcctgtgagccggtcagtttccctgcggatcagtttgtccagagcgtctaaatcctccggtgcaatggcaaactcccggtaattttcataccacaggcccgtagagactgccgcgatgggcgcgattttctccgaaccggatggaagaaggcgatacacaggggcttcgtcataaagaagcatctgctttgccgttccctgtggtatgcggtacttatccatatccgggttctgggctgcctccatatattgcatattcaggcgttcttctaaatcctggggcatataacgaaatgcctgatccatccactgtctgaacatcgtggaatagtggtactgccattccgtaacttgatttggggcataagaaaatccccaacttttcagagcatctttttcgtaaagatccatttcagtccattctttcaggctgaccgtagccgctgaaccatctttgcgttcgatattgacgccgcaaggatagaggatatttctttttatatcctgccgcagcgtgtctaaatccatcatcaggacatctccgtacaagtgaccgtcctctctgcgttccgtatgaaacaggaaagccctcgctccgataaactccgttgttgagatcatttgatgaaggtctgccgtagaacaataagcaaacaaagcgtcggaaagccacatgtgatttttccccatgatggcaatggaatcagccccggtatttgtcgccagagaacgcatattaaattcgcattccctaagaaaatctccggcaaaaatatggatctcatacgcaaagacggataagtctgtatcacggatcaaatgaatctgcggtagtggttcctgattcaatcaaattcctcctttcatgtgaacctgacaattaccggctttccttatcatgggaaggtgctggctgtttttttgccggttccgtttttgctgcctgttcccgcattgcttccaaaacagaagggtgcctttccgcagtctgttccaaccgggcaagggtattaagtgcccactccgcattacggttaatggaggatataagggcgccctccactttgaaagcacctttgaacaccctggcaacctttccattttcttttgcgtttgtctccgcaggttttccttgaatagcacggcccatatttttgagatgccgccccatttcgtgatattccgtactgaaagcatcaattctggcaacagccctgttgctggcctgcatacttttttctgctgcactttgaatggactccaacaccggtctgacatgtaaaaactgtgtgatcccattcaaagcaacagtaccgcgttccctgaaatcggcaaggatattcctgcatccgtttatcatctggcctttgagttcggaaagacggtgacgcataacggaaatattcgtctccatagctttacagctcttttggagagcatctttcagggaatggttctgtaacccttgcatttcctgacgcactgcctttagttccttagttgcctccgaaagacgctgctccatcccggtcacatgctcgatcagtttggcaaattcttcataccccggtgtattgttatcttttaggagagcaagcagctctttgacctgctcattttccgcaatcggctggctatctgtctccgtcattcatcaatccctcccatctgccggtagctgccctccggcaatcttgccgacaatctccggaccggtttcataaatctgcatgaggcgttttgctgtgccgcagggctgtgcagctccgctggtccaaagacgcactgtggatggggcaacattcatcaaaagcgcaaagcccttttcgttcatgtccagctttttcatcagcgatttaaccatatcggggccgtagtctggacaccgggaagcctcggcaatcatctgcaaagcggtattttcaatttttttcattttcaaatcctcctgttatttgttttccagccttatgccgggacaaagctgatctggttgtgtttcatccttttggcaaagtccggcagcgaataatttaccccgtcaatttctgcatgggtgtcatccagacgatgacaaacagcaaaatgcctgtccccgtttccatagaacaggcagagtaaaccattgtcaggaatggaaaacagcgcttttccggcgctgtctgtaaagcatatctgttgagatccattcatgttgaaatcctccctaaattgaaacagccgcctcttttgggcggcgttggtgctggctggtttgcagttgttcccgaacctgcagcaatttctcattgtaatcttttcctatccggggagggttgacacttacccggatatgacggaaacgtttatcctcgtggagcatggtcttgattttccgggcattgacaaatccggcaaggtcgtggtccatataaagggtaacacgccggatctccgggtggcgttccaggaaagaagtcagcgccacatgggaagtacctcccaaagacaagcggtaaccattccatttccatccctccagctcttgaagcgttgcatgggaaagcgcatcaataggagcttcaaaaactgccacatgccggctgcccggactttgcggaggatagcaaaagttatatcctttgtcgctgccatagacatcctttttgagattgccgccgatactgcgcatacaggcgaacttcgctttcccggaatcatctttccctacaaatacacaaaccggttctccatgataccgggcttcgtaaaaaatcccggcttgtaaacactggcgaatgacttttgagctgatcccccgtttctgcaaataggagaccgcagcggtcgcgcaacgtctggcccaggggagagagaatgctttcttttccggttcctttgatacctgtatttctgccgtatttcggtaggccggttcctgccggatttctccacctaccagagcatgaaccgcatccacaagaccatatccacgaatctggatcaggtagtccagcgcattgatactccgtccacggctgttccagtaccagtaccttttcccggtcacatataccagactgtcatgctccttatgccggaaattaggtccatcccgtttcagcacgccgggttcatggaattgcaggtaagtaaacaagtcagcttcccgcgctgcctgaatctgttctttggttacgccgggcatagtaccggcacagtgattcttttcatcgtgctttgcctccttcctgtgatggaatgaaaaaagacacccaaaggtgcctaacagccgtacagatcgtgattgacctcggcacggtaatagctgtccattgtagccggggcattatacagcgccgccagcagatatgctttgatatttccgaccttcgtcgtgttcttgtcgatacagtcaaagacatactctaagtggccggaattgatcttcaggaaccggctcttgacgatctccctcggaaaatcatctccggcaatgcgaatgtaagggcgtttcgacaaaatcacttcaagcataagttcaagggcttcgtccagacgttccctgccataccgtaagaccagtaagtcatattcaatattttctttgatgatttcacgataggcttctatcagctctatccgatccatcccatccgtgcggctcgccgcctccggctctgccggatagattgatggataagttattgatttatctttttttgatttttttgtttttaatggattagtatttaattgtgccggatttgcctgttcaggttccgcctgtttaggttttgcctgttcaggttttacctgtcttggattttcccgtttaggtgaaagccctgtgttttcggtgcttacaggctgctcatggatcgtatattcaatgtctcccaactgcccgttatcatagcggagacgctgtctggtgagataaccatgccgctccagttccttcagggcagtagtgatagaatccacaccgtccttgcagatatgggcgagtcccttcgtggtataatcccaatcttccggcagcgacaacataagtgataaaagcccctttgcctttaaggacaactccgtattgcgcagatggtgattgctcattatcgtaaagtcctttgttttctctacacggaatactgccattgtatcgcctcctttcttcgactattccgttacaaagcatgatccctgtggtcataatggagatgaccgccagagaccttcgcatggtttttcagtttcacttcgccccgttcctggctctctaaaaatttctgatagccggcatctgtaaggaacaagcgcatcttatcgcctttgtcgccaacaggggaatcgtaagacaatacatcaaaaacgatcatgtgccttacctccgggtcaaagcgttcaagtgccatgatgtcatgccccttcaatttttctgcacctgattgctgtctggcctcggcgatcttttctccaatcgtccgggctggatagggcagacggtaattcttctgaatatcttttaccaagtccatgcactctgcatttgacagaacacgaagttttgccataagaccttctgccgcctcccgctgttcggaattatttgaatacctcacggtcatataaagttcattcaggatctttgtctgataatcgccctcaacctgaaagagcagctttttttccatttcgtttaattccatgaagatctcctttctcttgaaaataggtatgaaaaaagggcgcccaccttaaaagtgaaacgcccacggcaatcagcggtcagacataaagccggaccgctggcactattaaattttgtcgttaataaaacagcctccttttttctttatagttttcgtcaattttcaacttggaaaaggaattgaataaaagacgacaaacgctcaaaccccttgaaaataaaggctttttctgtttgtcgttattataccgtaacggcatagccacgcctcgctgatagcaaactaaggcataaatatacatgggattacccgacgcttacgttatacagacgtcaatacgacatagaatacatatccccatatatctcccccaaaaataagagcaaacggtaaatattttgaataaaattgtgtaaaaaatcatttaaggcaaaacaaaaccgccgttttgcggcggttttggcttatttggaggagaggaagggatttgaaccctcggtacgctataaacgtacacagcatttccaatgctgcgccttaagccagctcgaccacctctccgaatttagccgctgtcattttcagcaccgcattagattttaacatattctaaacaaaattgcaagtcctattttaaaaaatttgaatattcttaattgaacttttatcttatttctttttggtatactcacgtctgattccgctgtcattaatcagtatcaaagtatcgccatttatctcataatcatatgatagaacctgacccataaaacccatgtctaatattctcaaatgattatctattgtttcatatttgcctgttccatgttttgacgacatagtgccgtcatcataaaattccatttcataaccgctgccatttggctcccatataccaactatagaattatttccgcaagaaataagaatacacattacaagcattgccgataaaaccgcacatacttttatatctataaactccaacgtcacaatttaaatagattaattgttacttttctcaaaacttaatttatatattatatggcaccgaatcaaagaacatttgcaaatccctttgaacagacgcatcgttaaacaacgccataaataccgcataaaaaatacaaaatataactattgtaaccagcaaattgaaagctatcataataatagaagcaatagcccagttctttgacgtttcatcaaacttatcaccgcacgcccatacaattatcattataaaataaaccaaaccgccaacaataggtatccatggcagaaacatacgtcctacccatcttagaaccgatacgggctgacctattggttcactgtaaagcggcgtcattcctctcggaggctggtttggtctcatattatatcccgactgacgcaaaggcggctgttccgccgtcatatcagcatttggcctgcgcacgcctgcgccgcacctcggacacgcaacagagtttggctctatctccgcgccgcaattaaaacatctcattactccctcttcccctttcaaattatatttagattaattccgcaatatctatattttcgcctttgagacacacaacagctccattatcagcctcagaggattcaggatgcgcaataagccacttgtttctagcaaacagtctcttgtcctcatcatttttaatttctatatcaggcttttcgctgttagttcctttcggcaaaactataataactctaaacgaatctcctagttttccgctgcacggagcataatgcagtgtggttgcataaagttcaaccgccgtgcctgcaggacacaaaaaagcctcaaccaatccagtgtcatagctatcgcccatagcgtcctgctgtcttcccaaaagaagaaccacatcatcagcggcaatatctatttcgctgtccctatgatattccaggcagttcagctttgtgtttgttccattacaatacccaatttgaatcggcataccgccgtatatattgttgctgagcaactccgcttccggcatagattccaaattactatctcccggcacataaatgacctcatcagcaggcgccggagttgtgtttttaagtttatcaagaagccggctgaactctataccttctaccactcttccatactgagcaaactctttatcattaaccgattttataactaaactcatcattcattcctccatataaattgataaatctagtatatggtattttaaaagatttgtcaatatatgctagacttctatgcaattataaaatttttatgacctataaaaacataaaaacagtattttttcgcgttgttctcaaaaaatccatttcagcactctatataatcacaaaaacacgtaaaagctgcataatacaaatgttatgcggcttctattatacttcaatcatcgttttccgcgggattttttgggcaaaaccgcataggcttcaaaatctatgagagattgtaagcacttttaaaacagtaaaagtataacatgatttataccttcacataacagaaacagatgagcaattcgcggttacatttacggcttttactgcgtaattctccatagtaaacggcgtatattgaagacaaaacgattacgctcataaaaaattaaaaagaacacgaaggcttgaaattctctcaaaacctccgtgtttccgcctattttacagcaattcattttttacttcatgtattatcaaccgtattattcagcgaagagcccactccgcagaattaactcctaactctattcaaaattttaactgcttcatcgaccttgagcacctttccataagacacaacctttccgtccacgacaagagccggggtagtcattactccataagctgcaatctgtgaaaaatcggtaatatggtcaatagacgcatccatgttaagctgctctaacgctgcctttacagcagtttcaagctgattgcatttcgtgcagccgcttcctaaaattttaacgcttgccccctctgtttttgcttgttcagcctgtgccatactttcagcattgcaattaccgcagcaggaggcggtttcttctttttttcttttctttccaaaaagtgccataatgataatctcctttcatttaaaccaaaaaatagtgaaatatattaaacaaataaccaacaatgataattccgcctgcgcagataccaataaaaagagcaagcagtttgggctttactgccttccgcagcattatgagagacggcaaggacaaagtagtaaccgccatcataaaagataagattgcgccaagctgagcacctttggcaaacagagcttcagcgacaggaattgtgccaaaaatatccgcatacataggtacaccgacaagcgttgccaaaatcaccgagaaaggattgctgctgcccagagctgtttcaatccaagtctgcggtatccagttgtgaataaatgcaccaataccgacgccaacaagaatataaggaaaaacttttttgaaagtagcagaaacctgctccagcgcaaacttcaatcgttccttttttgttaaatccggggcttcaatatctacgcttccggctgttttgatatactgttcaacatgtttttccatgtgcagtttttcaatgattgtacctcctgcaacagctataactaaaccgacaagaacataaacggcagcaatttttgatccgaatatgctcattaacaaaacgagagagccgagatcaaccataggggacgatattagaaaagaaaatgttacgcctaaaggaagaccggcgcttgtaaagccgatgaaaagcggtatagaagaacatgaacaaaacggagtaaccgttccaagcaaggcggcggcaatatttgcacctactccatgaaaacgccctaatatctgtttgcttctttccggcggaaaatagctttggatataggaaatcagataaataagtacgcaaagcaaaacagtaatcttaattgtatcgtaaatgaaaaactgaatacttgcgccaaccttgctttcaagatcaagaccaacggcggacaaaccgctgccgatcaccgcattcagccatttcatgcctaacacttgatcttgaaaaaaattcaatatagatataataatctgcaagaaaaaccctccaatccatttacacatcgcaatatatcgatatattgtttattttgtaagccgcccgtactttaggcggcttatcagtaattacggctgcattgagtgctgcctgttaccgttgtaatttgattaagcaattcttttgcatgattaacgccttccggattaaaggaataatacgtccattttccttccttgcgccctgcaactatttctgcgtcgcatagaactttcatgtgatgtgataaagttggctgcccgatattaagttcttccaatagtttacacgcacacttttctccgctttgcagcaagcctaaaattttcaatctatttgagtcgcaaaaggctttgaatatccttgcgtttttttcatcttctgtcatgatccgagcctccttctttctatattcatttatattatatacatcatattgaaatttgtcaatatgtttttgcgcgcagacttgtacgatttgataaacgtcacacctcaatacctgagaatattgaaaacagcggcagacatatcacagaaatccggtttaataacattaaaatagaataacggccgccaattttgatgagtcggcgaaacaatagtaaaacatacagctaaaaaacttgaaattctgtgttatgattaagaacataagaacaggttaaaaaaattttaaaaaagcgattttaataaaaattatacagctggaaaatgggcgtatacttctcattgcaattggtttgcaaacgctttttcaaaccgcggtgttaacagattgtccgtccggtattatttatgaaatgttcagagaaaaataattctcaaaatagattaaaagaaattctgagttacagtcaaacgctgtgtcgattgcacattttaagatacctagaactgcgtaaaaggctttatttatgctgacataaacaaacggacagatagaattactatacagaaaaaataatctgtcgcctaaaaagactaaataccaaagacaaaagcgcatattatcactaataaactgatatggactgaatagacttcccagctgtcacattgaactaaacagaaatgtaataagccttaatacaagcgtaaatataatcctgtcttaaaccttccttataactgccgaattaaaactttttacggttttatatatttatataaataaatttttatgttatatcaatatcatgttataataaatatagtctcaaactgtattatagttaaaattgttttactataaaaattttattttgactaaatataaaaaatatcatataattttatttacatttacacatccaattttatactttttataaatctgcatttgatatattgaaatgtaatcagccgtttgtctttgtacagtccgttaattgacagcttcagccgttttctgatttagaaacaaaatatataataatttttctttaaaaaaatctattaaataagtgaatatttttactttctctatttactttaataataaaagaggcgtcttaaaactgaattataattataacaatactggataaaaatataaacatttcagcaattatcgtcgttaaatattaaaataaaaatttttataaaaaatgcaacatttttacattccgagttgtattctatatgaagttataaaataataaatttggaggttttttaaaatgaagaacaaaaaaatcacagctgcagtacttgcaggagcattatctttatcattgacaacagccgtactggcagacgctgaccctattgacagcggagtaccgctgctggtttcaacacaagcctgccccgcaaacgttttaataaacaacgaacaaatccccgcaaatatctatgaaaataatggtcagctaatggtgcccgttcgtttaatcggagaaaagcttggatttaaaattgaatggattgaggaagaaaacgcagtatttttagataacggtaaaaaaaatacaactgtctatattgggcttgacagttattacaccgctagttccacagctataggtatgtcggctccatcatcgcttggggcagctcccgaattattgaatgatacaacttacgtaccactaaagctatttgaactgcttgatgatataagtgtaaatattgataataatactatcactataactagaaatgacaattcagataaagaagataattcattggttcagattccaaatcctattatagaatataacactgtagacgaagcaaaagccagtctgggaattgacgcttccattccaacagcgctgccggcaggctatgagttatctaaaataacaaccatttcaaataccgcacttgatttgacatacgtaaacggcgaaagcgaactcagttacagaaccgccaaaagcctggaagatatatccggcgactataatacatatgaatttacaaaaactgcagaaataaacggatatgaagtatcttacagcggaaacggtcaaaaagtgcacaatgcaaaatggaacaacggtgagttcagtttttcaatatatgcggataacggtataacttttgatgagcttaaatcaatgattgaaagtattatataaatatgttatcataactataaaagccgcagttatgcggctttcactgtgttatcattttattgaaaggggggcgtttgcttgcacgcgttagattgtaatattgaaaatctcgttaacaagtatggcgatacagtttacagacttgcgttttcatatatgaaaagcaagcaggacgccgaagatgtttctcaggatgtatttataaaattattcgaatataacgggaaatttgaaaatgaaaaacatgaaaaactttggataatgagagtgacgtccaacatctgcaagaataaattaaaactattttggcgcagaaacatctgctctatagatgaagttcaggagcacccatattatgatgaatacagttcagagaatttagtatacaaatctgttataagcctgcccgctaaatacagtaccgttatacatcttttctattatgagggatataagacaacacaaatagccgagataacaggacaaaaagaatcgacggtccgttctcttttacacagagccagagaaaagctgaaaccaatactaaaggagatgtatgattttgagtaaaaaatataatgacgcaatggacaaaatagttatgtccgacgaactaaaaaacaaaataatcttacaggcaaaaaatcaaaagaaatacacccccaaaatatactatatacgccgcgcggccgggattgccgcatgtttggttttaacggttacatctataatagtttttaaatcaaatcccaatattcaaaacacggcgtttgattactcttcacagtacacagaaccgccgactgttaatcatagtattattccatacaacaattcaagggaagaaaactccggcgattctaaccaaataaataatgagcaggaatacaataatgaaatttctaacagccccaataattcaggcattaaatccgggcacgccagcgctgtaaaaccaaaagatttttctgataatccacgttatactgaaaacaactctagttatataaacggacaaaatcaatttgacaacactcctataaatccggaagatgaaaacaattcaaatattataccgccagtccaaaacgacaatactgatgataatcaaatagataacagcagctcaggagaggtttcaagcggaagtcctatgcagtctgcaaacagtattgatgaactgagaaaaattgctgcttttgatttttctgtaccgaaatatatacccgacggctaccgtccatacgacttttctttaatattcggcagcgtagtacaaataaaatataatagtaaaaatgactgtatgacatatagaacaggacctggaaaagccggaagcgagggagattataatatttatgataaagaagaacaggttgaagtaggagaaaaatccgtagttttaaaatctaatgatgatatatatcaatccgctgtatgggaggacgacagtatgtcttattctgtcagaagtgaaaacggtattgaaaaagatgaattgacaaaaacggttgacagcgttgatagtgcatcaaaaacaaccccaactgaagaagaacctctctcaaatcaagagattaaattatcagaagattctgaatcaaatcaagcaaattccaataacgaagcgtctaatttatcaagagtagaagtgacagattatacagataacgaagaagcagcaaaaactacagaatcctctgataataatccgaataatagcaatgaaagcgatgttttcgaaaacggattatcagaatgaatcatagtttgataaaacataaatttgtaattccaatattacaataataatttgaagtaatgatttgaacaagcttcaaataaaattattatagcctaataattaaattataattttcaaaactcataaatacatttatcatagtatcttatggttaaatataattttataattaaaacattaaaatagcttaaataattaccttcaataaaaataatatattaattagaaatttataattttttatatctatataattaaattatattttttaatactcattaaatatatttattaaaatttcttataagttaaatataattttataattaaaaaatataaatagcttagtaatcaactatcaatataagtgaattaactaattagaaaatcaataaaatttttatagtatccattacgatcatatagccaaaactttattacagaattcaatataatatgcgcaatatactccgcaaaatatttttatcacatttcaatattataaaaaataagcatatgctgagcatatgcttatttttatatcaaactaatattagtcttcagcgtccaaatccaacaatgaattattgtcagaagcaaccgcgccatagcttgcataaacatcaatattattatatataggcattccggttccggcaggaacaagcttaccgataataacattttccttaagtcccacaagcggatctgtctttcctttaatagccgcgtctgtaagaactctggtagtttcctggaaggaagctgccgataagaatgattctgtagcaagagcggcttttgtaatacccattaactgaactgaatactctgccggttcttttccttcagcaataaccttatcattaattttctcaaggtcgtatatattgattaacgaacctgtaagcaatccggtgtctccgggattttcaatcttaaccttatgcatcatctgacgaacgataacttcgatatgcttatcgttgatatcaacaccctgcagacgataaacacgctgaacctcttgtataaagtaattctgtacagcggtctcgccttttatagccataatgtcatgcgggttaagcgaaccttctgtgattggatcgccggcctcgacttcctgaccttcgcgaacctttattctggaaccgaacggtatcagatacgtaaaggcttcacctgtctcctgattagtcacaataatctcacgcttttgtttagcttcgctaagatgaacagttcctgctccctctgtaacgatagcgacacccttaggctttctagcctcaaaaagctcctcgacacgcggaagaccctgtgtaatatcatcgccctgagcaacaccgccggcgtggaacgttctcattgtcagctgcgtacccggctcaccgatagactgggcggcaattataccaactgcttcgcctatatcaaccggcttcgcagtagcaaggttcataccgtaacacttagaacaaataccaaccttactgcggcatttaaccacagaacgtatcttaacttcttttattcccgacttaactatttcagccgccttatcatgagttatcatatcgccgtcagcagcaataagttcgcccgtttcaggagaaacgaggtcgccgattatagttcttccctcaagtctgtctgccattggctctataacttcattaccgtccattatatctgaaacaataattccgtcatccgtaccgcagtcatgctcacgaacaataacatcctgagacacgtcaaccaaacgtctggtcagataacctgaatcggctgttctgagcgctgtatctgtcaaaccttttctcgctccgtgagtagagataaagtattcaagcactgtaagtccctcacggaaattagctctgataggaatctctattgttcttcccgacgtatcagccataagaccacgcatagccgcaagctgacgaatctggttaacgcttccgcgggctcctgaattagccatcatataaatcggattaagctgtttaaggttatccataagcgcctttgtaaccttatctgatgtagagttccaaatattgattaccttctgatatctctcgtcatcggtaagaagtccgcgcctaaagttcttaacaaccttatcgatttcctcttccgcttcgagcagatactgtttcttttctttaggaatttccatatccgaaacgcctacagttatagcgccaatcgtagaatacttatatcccattgctttaacatcgtcaagcaaagtagctgtttcagttatgccatgcacctttatgctggcgttaataatcttacctaacagctttttatcaacaccgggttcaacgttgtcgccgatgatatttttagcgtcaggttttttgagaacttcatctccaatttcgagattaaatctcttatcagggtcggttctgtcaacgaatcccaaatcctgagggattttttcattgaatatcaatcttccgacagtagcgtctattatagcgctctccgtcttgccgtctatctcttttgtaacgcgtacctttataggagcgtgcagacctactgttttatttatataagccagctttgcctccgtaggagaactgtataccctatatacagtatgaccgtcctcttctctcggagaacccagctcagtatcatctttaagagtaaggtaatacgaacccaaaaccatatcctgagtcggaaccgtaaccggcttaccatcctgaggctttatcaggttgttcgctgacagcatcaagtatcttgcctcagcctgagcttctgctgaaagcggaaggtgaacagccatttggtcaccgtcaaagtcagcgttaaacgcagtacaaacaagagggtgaagcttcagagccttaccttcaaccaaaacaggctcaaaggcttcaatacccagcctatgaagcgttggcgcacggttcagaagaaccggatggtctgcgattacatcctcaagcacatcccaaacttcttcacggacgcgctctaccattctctttgctgattttatattatgagcaagcccgtcttctaccagcttcttcataacaaatggcttaaacaattccaaagccatctttttaggaagtccgcactgataaatctttagctccggtcctacaacgataactgaacggcctgaatagtcaacacgttttcccaaaaggttctgacggaaacgtccctgcttacctttaagcatatctgacaaagacttgagcggtctgtttccgggtccggtaacaggtctgccgcgtcttccgttatcaattaatgcgtcaaccgcctcctgaagcattctcttctcgtttctgacaataatatcaggagcgcccaaatcaagcagacgtttcagtctgttatttctgtttataacgcgtcggtaaaggtcattcaagtcactggttgcaaatcttccgccgtccagctgaaccattggtctgatttcgggcggtataacaggaataaccgataaaatcatccactcaggcttatttcctgactgtctgaaagcttcaacgacctcaagacgtcttacagttctgatttttttctgaccttttgcgccttccaaatcattcttgagttcctgatatagttcctcaagatcaatttcacggagcatttcaagtattgattcagctcccattccggcacggaacatatcgccgtatttctcacggttttctgtatattccttctcagtcagtatttgatttttcataagtccggtattgcctgggtcaataactatataagcggcaaaatacagcactttctcaagcgcgcgcggagaaatatcaagcattaatcccatacgggacggtattcctttaaaataccaaatatgtgaaaccgggacagccagctcaatatgtcccatacgctcacgccttaccttgcttcttgtaacctcaactccgcatcggtcacaaacaacgcccttataacgaactctcttgtacttaccgcagtgacactcccagtccttctgcggtccgaatattctttcacagaacaaaccgtctttttcaggtttcagtgttctgtagtttatagtttccggcttctttacttcacctctggaccattccctgattttttcaggtgaagcaagtccgattttgattgcttcaaaattttgatattctcccataaacgaccatgcctttctactcactgtataaccctttgtctgccgtgagttaagcaaacaatatcaattgaaaaacataaaccgataacggctgaacagtttatgctgactgttcttaattagtaattatcgtcgtcttcatcatcaaaatcttctgcatctctcaattcttcaaatgacttaacatcctcgtcgtcctcaaaagctgaaacgtcagcgtcgccttcctgaatcaaaggagccgccaaaatctgagttacctcgtcaattatatcgctttcagtctcttcttcatcagcctcttcttctgccaaaagttcatcttccggttcagccgccttagcctgaacgagttcatcgtcctcaaatccggcaatgttaacaggcaattcctcaacctcgtcatcatcgagagtttcacgaagtataacctcatttccgtctccgtcaaggactttaatatcaagagccaagctctgcaattcttttattaataccttaaacgactcaggaactcccggctcaggaacattttcacccttaactattgcttcgtaagtcttaacacgtccgacaacatcatccgacttaaccgtcagtatctcctgaagcgtataagccgcgccgtaagcttcaagagcccaaacttccatttctccgaaacgctgtccgccgaactgcgctttacctcccagcggctgctgagtgacaagcgagtaaggtccggttgaacgggcatggattttatcatcaacaagatgggcgagtttcagcatgtgcatgtaacctaccgttaccctgttatcaaacggttctcctgttcttccgtcatagaggacgctctttccgtcttcgttgtatccggcctcttttaaggcttccattatatcttcctctgttgcaccgtcaaataccggggtggcaaccttccagcccagagccttagcggcataacccaaatgaacctcaagaacctgtccaatgttcatacgcgaaggtacgcctagagggttcagaactatctgaagcggtgttccgtcaggaaggaacggcatatcttcaaccggcagtatacgcgatacaacacccttattaccatgacgtcctgccatcttatcaccgacagaaatctttctcttctgtgcgatatagcagcggactacctgattaactcccggcggcaattcatctccgttagcccttgtaaacacctttacatcaactataattccatattctccatggggcactctcaatgaagtatctcttacctcacgggctttttctccgaatatagcacgcagaagtctctcttcggcagtgagttcggtttctcccttaggagtaacctttccaaccaaaatatctccgctctcaacctcggcgccgacgcggattatacccctctcgtcaaggtctttaagcgcttcttcgccaatattcggtatatctcttgttatctcttcaggtcctaattttgtatctctggcgtctacctcatattcctcgatatgaatagaagtgaatacgtcctctttaaccagttcctcgctgattagaatagcgtcctcgtaattgtaaccttcccaggtcataaacgccattcgaatatttcttccaagacctatctcgccgtttctagtagacggaccgtcagctattatctgaccttcctttaccttttgacccttttcaactataggtttttggtttatacacattccctggttggaacgcttgaattttataagcttatatgtgtccgtatcgccgtcgtctgtcttaacttctattcttgtggcagacacacgggaaactgttccgtctcttttggcaagaacacaaacgcctgagtctttagcggctttatattccatacccgtaccaatgataggagactcaggaaccaaaagcggaaccgcctgacgctgcatgtttgaacccatcagagcacggttagcgtcatcgttctcaaggaatggaatcatagctgtagctatagatgtaacctgtctcggggatacgtccatatagtccaccctttcaggcggaacttctataaattcatctttatatctagtgacaattttcttgttcacaaatgaaccgtcatcattcaaaggctcgtttgcctgagcaacataaaaaccttcttcataatcggctgtcatataagtcacttcatcagtgacaatcattttctcatggtcaactcttctgtatggagtttcgataaaaccatactcgttaactctggcaaatccgcttagcgagttgataagtccgatattaggaccttcaggggtctcaataggacacatacggccgtaatgagaatggtgaacgtcacgcacttcgtatccggcacgttctcttgacagaccgccgggtcccagcgctgacagtcttcttttatgagtcagctcgccgagagggttaatctgatccataaactgtgaaagctgagaagaaccaaagaactcttttattgcggaagttaccggtcttatattaatcaaagactgcggagtaatagaatcaaggtcagatgtggtcattctttcacgaaccacacgttccattcttgaaagacctattctaaactggttttgaagcagttctccaacgcttcttattcttctgttgcccaaatggtcgatatcgtcaacttcgcctactccgtttgcaagattaccgatatatgacatagacgctataatatcatcaataagcacatgcttaggctgaagctcgtcgcgtctgtcctcaacagctgttttaaactcgtcagaattcggatctccgaactggtctaaaatttcatcaagcacgctgcgtctgacacgctcggtaattccgcactcgcgcggactgtagctgagctcttcgcctattttattcaaaatatactcaggcatatcaaccatattgtttgaaataaccttcgtctgtttgccgtcacagtctaaaacgacctcgttaacagcatttatctcaagactgtgagcaatttcttttgtaattgtctgaccggcctcacacagaatttcaccggtaacagggctgataatattctcagccgatacatgacccgtaaccctatcgcttaacatcagctttttgttgtacttatatctgccgactttagccatatcgtatcttttcggatcaaagaaggtgctggaaatcaaagactgagcactgtcaacagtaggcggctcgcccggacgcagtcttctgtacacttcaagcagaccctcttcgtgggtcttggttgtatctttctccattgttgcgataaggcgttcatcctcaccaaacaaatctataatttcagcgtcagtaccaaatcccaaagcacgtattaacacggtcacaggaatttttctggttctgtcgattcttacataataaatatcattgctgtcagtctcatactcaagccacgcgccgcggtttggtataacctgagacgtaaacagctttttgcccagcttatcataatcctgagcataatatacgctgggcgcgcgaacaagctgagacacgataacacgctcagctccgtttataataaacgtacccgacggagtcataagcggaaaatcgcccatgaatatctcctgttctttaacctcgcccgactctttgtttatcagacgaacttttaccctgagaggtgctgcgtatgttgcatctctttctttacattcctcaatatcatatttcggctttgactctaatctatagtcaataaactccaaaataagatttccggtataatccgttatgggagaaacgtcatgaaagacctccttcagtccttcactcaaaaaccatttgtatgaattggtttgtatctcaatcaagttcggcatttccaaaacctcattgattttaccgtaactcatacgtgtgttttcgcctagtttcacaggatgtaccataaaaccgatcacctctcgtataaaattttataaaaccacaaaatatatatttcgggcatccgaatacaataaaaaaatcgcttaacaaccggggcttaaaaatcatagtaaaatctaacaatccaagactgcgaaatccctcgaaaaaacgttgattctaacatacaacaactctttctcagtctcagttataacctcaaaataagcaaacttcctcactatatacagacatatattttaccatacaattttttcaatgtcaatactgatttataaatatttttaaaataaaaaacataaaattatatcttgcggaattattaattttatagattaaaaagcgcagtattcagcgccgcgttttatatcagcctatatcaatttttatctcactgaatttttttatctccggttgattacttgtatgagagcctatgtgtttttccatccataccatatcataccacttgttaaatttatatccgcatttatgaaacttcccaacatacttataaccgcgctttttatgaaaaatcaaactatcgtcggatatatgctcatcttttttacttagacaggcaatacaggcattaagattcaaaattccctgcattttcaaaatgttttccagctcattatatagaatcttcccaatccccgacctcctcttattcatctttatgtatacagaagtttccgccgcccatttataagccgcccgctcatgaaaggaatccgcataagcgtaacccaaaacctcgccgtttttttcagccaggagatatggatacttgtccagcacattacaaatcctttcagcaaaagtttgtaaagaaggcacttcatattcaaacgtaacagctgtgttcctgacatagggctcatatatatttagaagcgctttagcgtcctccgcttttgccgcacgtattttaatttcattattcataagtttttcatcctatctaatttgtttatcttatataatttgttcgtcttataaataaaacacttgtttatactaatatataatcataaataagaacttacaatatattttataatttagtcttatatatgtcaatcttttatatagtcataatcaaatatacaagtttaaattaagttttgccatgtattttttaataacaacaggttccggcagaatgataaatataaaatcaacagccaatcttttgcacaagtcaagtaaaaacagacttataaaaaaactgtcttccccgggaagaataaaataaattctcaaaaatatgtttttttatgcccggagaataaaattatatttaagaatatgaaaacaaatttatcatattggagatacaaaattaaagagatatttaaattcatatattaagtaccgcttcaagacacagtataacaaaaggcagaaaaagttaacgtcaagaataacattaaaatactgaaatttagactaataatctatctatgtaacagcaaatggagatagtataaaactgaaaccaatatcagtacattactttaattataatttaatccgtctcaagaactctatgtcttcatgaactgtgacaactccatccggataagtattggatttttctaaaaatgttaatttttttcacattcaaaggcaaaattcctgttattagagctaagttttcattaccttttttataataaatatgttataattaatttgttttttaattaatgaagttaacagacaaattagggggtaaacttatgattttaaggggagaaaaaaactgtctaaaaaaattatgttccgcatttgcggttctgcttgcgctgctcactttagcactgcccgttcatacggtctttggggcagacaatattccggcatttccgggcgctgaaggcggcggcaaatatacgcttggagcacgcggcgtctcgtcacccacagtataccatgtcacaaaccttaacacaaagggcgccggttcattcgctgacgcggtttcaaaacctggcagaatcattgtttttgatgttggcggaaccattcgcttaaacggaacttttacaataaaaaacagtaatttgaccatactcggtcagaccgcccccggagatggaataactcttctcggaggtgatatttctatagcaaacggcgtcaggaatattattatgagatatttgagagtcagaccaaccgatataaacggcggtgaacctgacggaatcggcggacgctggaacaaaaacattatcctggaccactgcagtacaagctggggcgttgacgaacttttgacgctgtacgcaggctcaaccgaaagcggtactccgagttcaaatatgacagtacaaaactgcctggctacagaaagcctaagaatgtcaaaccactttaaaggcgcgcacggatacggagctattttcggaggaacaaactcaacatggcatcataacctgcttgctcatcatgacagcagaagcccgcgtcttgaccgtgagctgcaaaacacagacgttcgcaataacgtaatatataattggggtcaaacaaactccgcatacggcgccgaaccgtattcatacaataacgttactcaaactccttcaaacgtgaattggataaacaattattataaattcggcccgggaaccgcgtcaaaaataaaaagcagaatatttgatatatcaaacgcttatcctgatgtctctaaatccaatttttattttgacggaaactatatgtatggggacgccaatgttacggcaaataactggaacggcgtaaacaactcgtcggccgcaaacaagctttccgccccaatagatatgggagagtatgagctttccgaaacccaaagcgccgaagaagcttataacacggtattatcagacgcaggcgcaacccttcctaagagggacagcatagacgcgagaataatagctgacgttaaaaaccaaaccggcagaataataaacaatgcgaatgaagttgcgggtttagttgaaatgcctgcaacaaaacgcgtgttctccatccctgacgattggaaatccgaaaacggaatgggcacggcttctgaaacagagatagtaaaaagcggtcaatatgccggatatacttggatagaagcctatgtaaacgactggactttaaaacagtcagcacccacaaacccttctatagttgttaccaatccagcgatacagtctatttcggatactatagacgggaaacagataaacaacggaaactgggaggttctgactgtagacttcgacctgaattactgtgctgaagcgtcaccttcatcagatgacacatatataaccaaaatagaaatatatgacggttctaaactggtaaaaacagtaaacgattctgctgttaacacagatataacattaactccgggcactcattatatttcttcaagagcttataacaacaaaggcgaatcaactcaaagccccacatctattgtgtatgcaaaatcatgttctgagccgggaagtttcagtcatgctcaaatcggcactaccgcctttaacggaaaaggcggatccagcctggacaacggagtatataccataatgggaagcggagcaatcggagctggaaaaggttcagatacctgcgattttatgtatcaggaaatcaagggcgattttgatatttctgtcaaaaccgaacaggttccgaaatttgaaaacggcgaactctgcggaatcatgcttagggaaaaccttaacggcaattcgagaatggctatgctttctgacggctggcttaaatacggcgaaaatgtaaaggctatatataggacctcacagggctcctcagcaaaagtttcatggtttagaaacagcagcggaaaagaaatatccaacagcgactcatatgacaccagcaaatctgaataccgcgttcctaaatacctcagaatacaaagaaatggcgacgttattactctgtcagtttcagacagcggcactaactggagagataatccgagacagcctcaaactataacaatatcaggattagcagaaactctgtacgtaggactggcggtcgactcaatacagggcacacctaggaaagagtatatggcggaagcaaaattcagcaatcttaaactgacagatgaaaatgcaacgccaacgccgcagccaaccgctacccctgaaccaacaaaacccccaatcccaaaatatgaaattgccattgatgaaaatattcaaaacggaaccatacaaattgagacggaaagcggtatcggaagcggcggcaataaaataacctggcttgccgacgacaatattccggcagacgccgttgaaggtgtgaccaatatattcggcaacggaaaggcagttctgaatataaatggaaaagacagcagcgacggaacatttactttttgggactctgtacaatggaattatgttgatgtaaacggaagcagaacaaaagttttaaaaggagaaatgaacccctctgtccaatttccactcagcctatatgagccttttggaaatgtctttagctttaccccaaacagagccgggtacttaaccttagaattatatttataccgcggcaaatcatttaacctttatgatgatacaaccaacagttattttatagaaaattatacgccttcatctattgaaattaacacgtatgttatacctgttgaagcggattcaagatattatgcttgggctaatggatcgaaaataggattaaagagcgttactttttcagacaaagttccaacagccaaagaaggtgaaaccgtaaaaataatcgcatcccccgaagacggatactttgttaattccgtcaatgtagacagcggaagtgtagtagaaaaaactgacgaaaacaactatacttttactatgccggccaaaaatgtagttataagcgctcaattcagcaaaatcggcgaacctaccagcacgcctgcgccgaccgctgaaccaacagcaccgccaactgctgagccgtctgcttcgcctaccacagaaccgtctgcaacaccgagtgcaaacccgccgaccgcaacgccgaatattcccggaatatattacaaagaatatccaaagcttgaaaacggaaaagtaactgctgaaatcgttaatactaaaaataaaaacgcattatttgctgtcgcagtatacgatgagacaaacacaattttaaaggatattaaagttatagaaattccatattcatctgattctcagtctcagaatatagagattgcattttcagaaaaagataatatcaaagtatacctttgggatgatttgttaagtcctcaaaatgacgtaatatcgctggaacaataactatattataaaattattttctctataaaacacagatactgctttaaacacaattaactgcaaaaactgaaaacggccgtcaattgatgtgacccccaaaagttagacaaaatctaatgattgtgaggtcggtttaaatccagacggccgttttcaattctaattaataaataacttatacattttaacgctttaatatgtgttatctaatctctgttctaaaatattaagttttccctaacttgtttcacatctatattattgaatcatacacagatattttaaacacctttcaaatatatccgccaactgttcatactttacgttaaatatttgttatatacataaattaatatccacatagaatttatcacataacattataattaacaaacttttaagctaaaaaacttatacttcactttagcattgctgtaagttgtaattataaataccatatttctaataattaattacagaaaaagagaccgaacaatgaaccgccctcccaaagttagacaaaatctaatgattttgagaaggttcaaagcccaatctctttttccacgcaacgaacagtagttttgattaaatatataatttactataaaattaatacattcataacaaatattttattttctttttatatttccacattcgattagtggttccatacttgccatatcgttccaaacaaatattttaatttcctgtgaagcttctgaaggcattatacttatctcgccgtctcccacacattcgcttcttgtcatacctatcatcataccattgccgtcatactcagctgccgccgcagtatattcagcattttcaggcattccgtttatactgcacgtcagttcgctgtcgtcatagccggttgcttcaacgccgttttggcggaaaacataggtatctgtttttggttcttcagcaagtgtttcagttccaatcgatatattatctatacctattgtaacagttccgcttcccggagtcattaattccatttctgtaggcgtcagagtcaaattgtctatatctgcattcggtctctgaacccctgagcctaatataacggagtcacggtaagtatactttgaagctccgtcgtttttagtataaagtgcaacctcgtttttaccgtcagcattttttatatattcaagcctaataccataccatttatctttttgataggtgaaatttgaaaaaccaaaatctactcccttaggactatcgtctgtgctgcttgttcccatagaaaaataatcggtaagaacaagctcgctgcttgttgaactggactctcccttgttgctgctggtctttaaatcaaatataacacttccgtttgaataagtattatttgcatttgcattaatttcatcatatactcttaggaacgttgtgtccttttcaatatcgcttttattaaactcaaattcaaatacgactttatttccgcttaacggcgaatccggtttatacgaccacttcaacctgcttttactgttatccgcgagctttagatagttactgcttccgctgcggtttgcaatagtaatagaatccgccgcgtcagttatatcaaggcttatactctttccattcttgtttgtgatggtatcatttttagcatatgaagttcctgctgaaagctcatcgaagtcccacttttcataatttgattcgtatatctcagaagaaccctctgtttttttggcaaacttcattcctaaaagctttccttttgttcccgcagggaagatataatatgtattcccggcttttaccttagctgaaaccgtaacggttcctccgttgcctgccttcataccaacatagtcagttttataattctcaactccttcaggtacaatataaagcgtctttgtgtccgccaattccgccgcatatccatatagcgttccatcattaggagccgtatatttaagacatgttccgctgcctttgccatcgctgtaaccgccgtttgcatccgacgttatatatgtcgttcttgatacgccgtcaatggagaccgaggctccgagttcccccgtgataataccacttacattgctcagtccatcagccaaaaccgtgcccgccgatttgccgttatcggaactcgacgcgaaccaattcatagttgaagaaagtatcgtaacagtgaaatactttttaagcacacaatcaccattcgctatatccgcggcaatgtatgcattttcattactcacgccggttggctgaatcacctgagtaacagcattattctctattttcaaagaatccgatgaagaactccagcttatttttgagccaaacttagaacccgagaccggcaaactaatttcatcagccgacgaaattttagttttagaaagcttaagagaatttaagtcctctattgctttagaataatcggctccaagcttgtccagcgtcggtgataaagtaactaccccctcggggaatgaatctacagtcaaatcattgcagtaatgttcaatattagtataggctccgccaatataataaccatttgcatcactgctgtcatttggattcagacctctggcaatctcccagtcatcaggcataccgtcattgtcactgtctataatttcctttttgagaacagattttgggtaatattcgtcataatttacatacttaatactgtatttgcttctaacatccgctgtcacttttgagttctcaagtccgcctgacagagaacctgagccggtgtaagcgtcatttaatacctcagcgtcaattttattccttgaatctgaatttacagccgcccctgcatagctgacaacattattaaaagcggcgtctgctgattcgggattttttgcagcagatacatcaataccatttgatataataggaaaatgctctgacgcacgataatgagactcgtaataattaagactgcggtttaaactaagtccgccattccagttattggtgctcataggattggccgcgttgcccttcctgtccgtcatcttatttccttccataaaaaactttgtagtttcatagttggaaccactgtcgagagaaccaaaattatcaccgtttctcgaagaaatactctttttaaaataattgttcacatagtttaaatgtccaaaagtgccgtatgctgtttgtccgccccagccatacaccacattgttcacatagtcattaggctgttctctttcaaccttacccctgaaatttctggacatattatgacaaatcaaattgtgatgccaagtattactggcggcgccaaacataggaccgaatccatgagagcctttagagtgtgtggaaagacaatttgcaggacctattatgctatactgcattgtcatatttctgcttgaataaagtccaaactgctcatcatttgcccaacctattgaacaatggtcaataattgaatttgacccctttgatccgccccaggcgtcatactcgccgcctcctttttcaccgggtcttgacgtcatatacctgacaataatattatcacctgccatagcaagctttccgttgcgcacagtcactccggctcctcccggagccgtctgtcccataacgcttatatttccgcttatacttaaatctgacttcaaatttattgttccgcccacatcaaaaaccactatccgccttccttttgaaaccgcgtcacgcagcgaacctgttccgctgtcattcaaatttgtaacatgatatatctctccgccgcgccctccggttgcaaacttacccgctccgtccgcgccgggaaaagcaattgaacggtcaggctcagtatcagaaaattcagcagctgacgcgttatccgtattcgttgacgccgccgctgttcctgccgccccaaacgccaatatagcagataaagccattgctgtgaaactttttagcgccctattaattttcataaccatatcctcctgcctcagctatttaatcatttagttatcatagcttattttaataaatttttctacagattttacttctaatcgcaataataagttattacaaaccaatatttcagtgttttgtttccgcattaaaaataaatttgttccttaaatttttttaaatcaattattatcctaattaattctaaactttatattattaaaaatatctataaaatattatagataaatattttaaaatactgacaatctcagtaataaaaaaataattagtttacaattttatattaagtgtcgattcacaaatttttattatgtcttatcaaaacaatttatgtaataataaaacttttttgataataactcagagttaaaataattacttcaaaacagatacgcttataatcaatctaactaatacttaaagagactcaatcaataaaatcatatcgggctttaaattttcgcacaccaaaattaccgggaaactcttacggcatactgaaacggagtgccatatccgccgttttctatccattctgatagactgacttcaattatttttccccggcttgatgaagaatgaagcattatatcatttccgcaataaattccgacatgggtaatattatcaggctccgcccctttgcccatacaaattatgtctcccggctccagtttttcataatcatatattttaacgccgcactccgcttgctcatatgaaactctcggtattgacaaacctatatctgaatatgctttttgagtaaatgccgaacaatccaaaacactgcgcggcacgtcaagatacacaacggcagcttccgcagctctgccgccttcagttttggtttcattgacatatacttcattgaagtcacttgttaggcacggaaaaaccataaatataaatatatatactaataatatacaaattactttttttatcataataaatttctcccaaaacaaattacatttaaatatattcatgtatatatttaatatttccggcaataatctccatataaaaaattttattgagtggtgatacttatgatgttaaaaaacaaacgccaagttgtaataatcaatgatatcaagtcggataaaattgaacaggcaatttttattctaagagacaatgtttctcaaaacacatccgaagtacagaaatacttttcaaagaaccgcgaaaccgatatagtaacagaagctcagagaataataaacagctttctgtatcctgatgtctattcgtcttcaaaaagacaaaccaaacctaaggttaaaaacaaagtgctggttcaaagtttaatatggctggcgtcatcaatggcagtagttggtgcgagcgttttaatactaaactggctgtgtatgtagtttattgccgtaaacaaaataaaaatttccaatttcttccatacgttattgcaaaaatctatatatcgtgatataatatttatatatcaaataatatctattattggtttttgattttcctggggggcttggataatgaaacgtttcgtttcaatctttcttttatttactctttgtcttataaatttaactgttttcagtgatgaaaattcacatcaaaaacaaacgctcaaagttggtttctatcaaatagatttttatcaggaacttaatgacagtggtgatccttccggatatgtttatgattatctctccaaggttggccagtatgccggatgggatttcgaatatataagagccccttttgccgattgtttaaatatgctggaaaacggacaagtagatattgtctgcggtataagcaaaaatagggaagacgcctataaatatgatttttctaaatacgagatgtcaacagccgcatatgaactctatgcctcctcagcaagagaagatatgaactttgacaacttaggtgaaacagctaacctgaaaataggtatactggaaggcagcagtcataactatcagcttgatgactatataaataagtatgggtatacctatcagcctatatactttaaaacccagcttgaaatgcagaacgcattgttttcaaatcaaatagaccttatttatactattggatccggcagcaaaaaaaatcttaaagttataacccggtttcccgagtcgcctgtatatttcgccttaaccaaaggcagtccatatcttaataaactggataatatattgtttgaaatgaaaaatatttcaccggccttcagctatcaaatgcataaaaaatatttcaataacggtcaaatattccagccgaatttcacacagcaggagattgattttataaacagctcgcctgagttcaaagtagtttacgacccgtattgggcgccaatagaatattatgatacaaacaacaaaaaatattcaggaatatcagccgatgttttacagcttatatcaaaatattccggtctgaaatttacaataattgacgctccatcatatgaggaagcatgccgaatgataaatgaaggaaaagcggatataatttcaggaatcacatatgactataactgggcgtccgaacacaatgtatcattatcaaatccttatctaaactctaacataatacaaatcaaaaaaattgaagaatcaaataagaacaccatagcgcttccaaaaggattttacataaataagtttatacgagagaaatatgaatcgacctctgcaataatagaatacgacacgattgaagaatgttttgacgcagtcgaaaacggcaacgtcaattgtacttatgcaaacagtatcactgcgaattatcttttatcaaagtttaaatattccgatttagtaagcaacgaccttacgggttctatacaagatatatctataggcgtatccgatacggcagacccaacactgctgagaataattgataaatcgctgctttcaataaccaacgggcaaatcgacaacattatagtcaaaaacaacaatatttatgatgacagttacaacctgaaaacattgttccatagttatcccgatatgatgacgctgctgcttagcataattattctgtttctcattatattttttatatgcttttttataatagtaaagaataaaattaaagctaaaagaactgcaaacgatgttatactcggcaaagtattgatgagcatgtatgaccaagtgtggcgggttacttataataacacctcgtcaaacgtggaagtcatcaacagaaacggcgtctctaattcatgcaattttgaatttggtttaaaaaaatatatagagtatatatgtctaaacaatatacatccaaacgacagaaaaaattttttggaatacttttctgatgtaaatatgtcaaaactattttgcggcgaaagtttcagctttgaagcacgcacctgcaaacaggacggcaaatactcttggtatatgtattttgtggaaagtattcacgatgataataaagcaaaatcaggctgcaaatgtattcttattgcaaaccgaaatatcgacgaaacaaaaaaacgacaaatagaatacgaaaacggcttgcgtgacgcgctgatagtggctgaaaattctgcaaaaactagagataaatttttaagaaatatttcacatgagataagaactcctctcaatgcaataatcggattcactaatctgtctaagcaaaatatcgatgataaagtaaaactaaacaattatctccaaaaaacagagtatgcttccaagcatctgctttctcttataaacgatatacttgatctttcgaaaatcgacagcggaaaattgcagacgaaaacagaaaaatttgttttgaaagacgctgtagacgaacttcttgccgcaattaacgctcagacagaagaaaagaatattgacttaaaaatatcttttgataaacgcctttcaggtcttgccctgattggagattctctccgtttcaaacaaataatgctgaatatattatcaaacgcagtcaaatttaccggtaaaaacggaaaaatagagtttgatatcctgcgccgctctgaagtggataatattttatacatatcatttataataaccgataacggaataggtatgactgacgaatttaaagacataatttttacaccgtttgagcagcaggatgaaagaatttcccgcgaatacggaggcaccggtcttggaatgtcaattgtaaaaaatttggttacgcttttaaaaggaagcataaatattaaaagtaaatcgggttcaggaacatccgtgacggttgagcttccatttaaatatgaaaataatcaaaccaaattaagtaaaaacgatcactctgaaaattcagaaaaaagtatagccggaaaaaacatcttagtaactgaggataatgctctcaaccgcgaaattatttccgagcttttaaaatcacaaaatgcaaacgttgaacttgcggttgacggttcagacgctgttaaaaaatataataattcggctgataattattttgatttgatactaatggacgtgcagatgccaaatctagacggatatgaagcgacagcacaaatacggaactcagaaaaacctgacgccgtaaccataccaataatagctataaccgcccatagctttgaaagcgatataaccaaggctctttcttcaggtatgaacgcccatatatccaaacctatcaatgtggatgatatgtttaaaaccctgcacaaatatatataaacaaactataatgtataaaattataaacaaagctataacttaaagaataaaaattaaatctaagcccgcccaattatatggaaaggcttagattttaattttatcataaaaaaattttaagactcaaattctttgcattgcaataactgaaataagactgttataacagaatagcattaaagaataaactccaattctttctcttctcccgctttaaaatcaactgtttttttactctctccgcatgatactgttattgtctgaggcttaaaagacttgattttagcttccgcttttccattaaaccatttaatggagacttccgcttcggttcttgccataagacctcttatttctccgcatttccactgcacaggcagcgcaggcaaaagttctatttctcctgtatttgaatagagcaaagcctcgttaataataccaacaataccaaacccggtatctgtacaataagtatctgcacgtctgtcagtattatggtcagtcatcagtgaagtgtaataaatttcactgtttaataatatatatagggtttcatacacagatttcgaatttttcagtcttgccgccactaaagccttatgtacccatccatgtgaagccgtgtcgtcatggcctttattttcagtgtttctgttctctatggcctgattgcacgcgtctgtgagcactttgctgtgctgagtttcatatgccggccatgcacagtaaagatggcttatatgcctatgaacattattttcctcataacctttcattgaccactcacaaagcgctccgctatcgtcgaatttataatcaggcaatagcttttcaaaattctgaatttctgatattctgtcctcatatccttcaaattttaatattttttcaacctcaatattcattctgagaccgtcgcgcgcggctgaaatatccattgcagcattggcggttatagtagattcatatcctttaggatgattttccggagaatacgatggtattatcagatatttttcacagtcatttaagctttttttaccttttaaataacacgcattgccgtccgtatcagtaaaatactcgggagtgcacagctgtttccaaaagttggtctgcattctaagcaaaggcaataatatatcgccgagcaattctttatctccaaaatcagtatttacagtaatatttccaaagcactgatacatctcaaagataggctgtatcatccaagacgctcctgcgttccaatactgaaacgggtagttgctgtcgtattccaccatcattgccctgtcgccgtcacagtttacaggaacctgaatagcgtcttccataccgtaagattttttcgcgttatctttccagtcatcaatctgtctcagaacaaaattaacatatcctattccgaattcttttaaatttcctgtattcataccgctggactgaatgttaacattggcgtccattgtatatatcccacgccattttgtgttccattcgccgctccacataccgcacaaacggctcatagtttttccggcgcagcaggtcattgcatatcttccatggttatatgccttttctacaaaagaactgctgagaacctcactgcttttctgtctttcaatcaagtcttcatttggtatattctcatcgttccccaatgaaaaatatactgccccaaacatctccttttgtatctcggcactctttttcaaagcgtcatcatagctgaacttactgcctccatagttttcagcggcagcaatacaatcattaagcaaagaatcaacaagtttataacttttactattcttaaactcttgaaattctcccatattaaaagtcctgccggttttggttatcaaataaacagcctcagcaccgcagatttttacagccggattttgttcctctccaacattttgtttttcatctgtgttttcaagcagtatcttttctttagttccgccaatattcaaaacataggtgaccccggcataaccaccgtttttcagttcagaaccttcatatgacggataatgagccgcttgggctatatatgagccgtcttcatcaacaagcttcttatactgcataaaattttcatcacgaagcccgaactttttcatcgatgagacatcatcaatacttataaccatatcaatttttgaatctttagatgatttttttatttctgtaatagttacattgtcagtatgcgaggcaaacgttcttctttcccatattccgtcctcatcctcaaaactaacgcacacttcgcccgtttcataatcagtccagcgcacatagctttcacagttccgttcattcatattcattctcagtaaatgacccggatgaaaacaataaaaacaagttctcttccttccatgcacgtcccacgtatcatcaaaatatattacagcctgccttgcctcctcaagttcgcttaaaagctcctccggtgtatatctcggttcatcactaggcattatgaaattaatattctgataaataatcgtatccgaataaggcgcgccgctggttataaaaccattttctccgttgcctcctaccattccttcacgccaggttcttccatcctccacactctccggaaaaggttttacttcccaatacttatttgaataaactctatttgttttcatcttcttcacccttaaaaataatttttaacctgtataattatatgaatcgttatttatatttacttttatttttaaacccttacagcataaaaatagaatagacagtagttattaaacctgccattcctatggcaataccgctcattgccccctcaacatctcccagttctaaggcctttgttgtgccgagtgcatgtgacgatgttcctatagcggtgcctgctgcgaccggattctttatacggaataattttatcaaaactggtgaaaacatggcaccgagcataccggtaaacatcagcgagataaccgttatcgctgaaacgccgccgtgactttcactaatcggtatcgctatagctgttgtaactgattttggaaataaagatactgtcagcgtatcactaaacccaaataaacggcacataaacagaacacataatatagaagccagcgacccgacagccgttccgataatcagcggcagccaatttgctttcagttccttaatctgagcgtgtatcttaaccgccaaagccgctgttactggagccagaaacagctctataaaacttccgccgacagcataattttcgtatggaatattaagcgccaataaaatagttacaataattatatcagcaataagaacaggattggctataggcgtcttaagttttttattagccattaccccgaaaacatatgcaaatatactcagtgtaaccccgaacagggcgctggatgttatgttattaattatgtcctgcatcagcattcatctcccgaaccaattctttttcttctgaaacgctcttgtattttcataacaaaagtgactgtataagccgttacagcaaatgtcaccacaaacgaaacaacacagataatcaaaatctgaacaatactgttttttattaaatcatactttgttattatgctaaccgctgacggaacgaaaaaaaacgacatattttccagcaaaaaatcattaacatttttcagcttttcaggatttgcccagttaagcataaacaatataaataacagcaccatactcattacgcttccgggaaacggcaccggtattagctccgctattatctgacccaccaaacaaataccaaatataaatccaatttgttttaaaattctcataattcaccagcctctagcgaaatattataaatcaaaaaaagcaaaaagtaaagacttgtgttaacacttaatcaatgatatactataaaaggtgatgaaatttgaaatttacagcggaaaataatataaatcaaaaaaacacttgctgcttcagtggacacaggattgttaagtctcaggactatgacaacattcttgctaatttggataaaatacttgaaacgctctataataagggaataacaaattttatctcaggaggcgctcttggctttgatacgctggcggcggaaagtgttattaaacttcgctctaaatattcaaatatcaggcttatacttgctcttccgtgcaaagaccaggcttgcaaatggaacaagatacaaaaaaatcaatatacaaagcttctcggaagcgccgatgaagttatatatgtatcggaaagctatacgcccgaatgtatgcacaagcgtaacagatttatggtagataacagttcggcggttattgtgtatattctctctatgtccagcggaacggcttacactaccaattatgctttagattcagggcactgtcggattattaacgtcctaaccggtgattttgaggattaaatatattaaaaggcggaataatatggattttacacaaacaatatggaatgataacagctaccaagcctatattgaatacctaaaaagtcttgctgacgacaaatataaagaatttaacagcaaaataacacctatatcaaacgaaagtcaaatttacggagtaagggttcccaaaatgcgcgatactgccaaaatgattgcaaaagggtcttttcgcgcttttttggattatgtggacattcttgataataaatccttatctcatgaagaaatttctatatacggaatggtaatcggatacgccaaacttccgttcggggaactctgtcaaagaatcagaacctacgcctctaaagtaaacaactgggcatgctgtgattgtcccgtaagttcgtttaaagaaataaaaaaatatattgaagaatacaaaattgaaatatatagatttttaaagagcgaaaacccctgggaacaaagagtcgggcttataattttgcttgattattatctctgcgataaagaaaacaccgaatacgctctaaacgaagccaacagcgtgaaaagtgacgaatattatgttcaaatggcgcaggcgtggcttatcgcaaccgcttttgccaagcaaagggacttgacaaaggattatctgacaaacaacttttcattgggagacgctgtcttaaaaatgacagtcagaaaactgagagattcttaccgtgtaaccaaagaagacaaggactgggcggcttcactgctgaaaaaatagtttataataaatcgatactatataaaaataaccggagtatagcggaataatttccgctgtttcccggttatttttatatatgtataacttctattttgttctgtacagctttataacataataaacaaaagcagctataaggtaaacaacaatacctataatcaataaattaatattccaatgtgagttaatgtttaaattcgtattattagtaatgaaatgcagaacattttcagctgctactctgattttattatacagtgccagccaaagcgaacccaaagcgcaaacgcccaagaaaatactataattcacagccctttgcttattctttatcttcccggtcagtcccagggataagacaactattgccgcagctgcaaacacaccggtcattacccacgttacaatctgcatatatgatagcattgaaggcatcaaatagagctgtcttagaataagaaccgctataatagccaaaataccaaagctcagatttatcatataccagtttgtaagcttttctcttctctgctccttgtcgcgaatcttcttgctttttgccgccattttttccttttttgtcattgccgccattttcttctctccttcattttgctgaagaatattttcagcattatatctcatatttcatctttttcatacataatcacagaaagagcggtgcttcctgcggtttctgtcctgagtatcctttttcctagtcctgcgcagaaggtattttcattcatgttttgaatagtctcagcctctgacggagaaaacccaccctcaggtccaatcaatactgcaatagattccgcctcaggatttgcccttaaaatttcttttaaatttttctttccgtcatgacccagctcctcataaaacattattgaaaggtcataatttttcaaaatatcagccatagcactgaagacaacaggcattgaaacttttggtacaagccctcttccgcactgcttagccgcttctttggatattttattgagacgctctatcttctgcctgccctttttatcatcagcaatctttgcaacagacctcgacgttttaacaggaacgatatcatgaacaccaagctccacagctttttgaactattatctccagcttatccgattttggaatcccttgaaacagagtaacttttatttcgggttccagttctgacaggctccttcccaaaatattggctatgctcttctctttttctatttttataagcatagcttcatattcatatcctgtaccgtcaaaaactataattttatctccgcattccattctcaagactttggaaatgtgcgccgcgtcatcaataatagtcaaagtgccgttgtctaaatcaatattatcaggttcagtaaaaaatcttcgcatatttttctccaaacttattggttattataaccgccgttgcctgtcttttttgggctgggacggcgataccgccttttgttgtttccctctttattatcagactccgaatttttcaaagagggattcttaggttctgtgtttcctgaatttttaactgccggttttttagaatctgagttccctgagtttttgggtgccggtttctttcctgcaggacgccgtcttcttctgttatttttgtttttgttctgattttctttgttctcacgctctgtttccttctcaaactcagtatcttcatttgcaaaaattgagtttattctctcgctgtcctcaagcagtctttgagctttttctaaaacttcctgctcttttttagacttcaattcgtccagtgacacagaaggctcatgtcctacaatattgaattctccaacattatatacctcggttttatgaccttcggttccgtctaactttactcttatctgctgcttaagcgttgctgtgtccaccacggttccggtaccgtccaaagtttcaacagttgcccctctttcaggcatagttttcagcgcgtcatcataagccgcctcttcatactgcaggcagcacataagtctgccgcacactcctgaaatctttgtaggattaagcgatagcccttgttctttagccatctttattgaaaccggacgaaagtcgtcaagaaaagtactgcagcacaaaaatctgccgcatattccaatgcttccgagctgtctcgcctcatcacgaactccgatttggcgcagttctatccttgttctgaacacactcgccaatgacttaacaaggtctctaaagtcaactcttccgtcagcggtaaagtaaaacagaattttgcttctgtcaaacgtatattcgacatctataagcttcatctctagtttatgcttaataataagttcactcgccgttttaaacgcttctttttctttaacttgattttcattcagctgctttatatcatcatcggtcgcaactcttattattttttttagaggcgcttttaaatctttttcactaacctcacggtttgggatagaaacctttcccatctctacaccatgagaggtctctacgactaccattgtgcccatagaaaggttttgcccgtccgggtcaaaataatacgcctttcctgcactgttaaatcgtactcctataatctctgccatgtatttcctcccaatattcacaggctaaacaaaacattgaaatcctaagatttgtattagccgcagcaattctttcgtattttaaggttatatccaaaaactgtaccgcggcacgtttggtagcaacattagctagtttacgcatctccgcggttttatcaacatttaccatttcatccgcaagcccaaactttaaatgaacaaaatcttcaaaaaagctctttaaaactgaaaatataaaacttaaatcatctttttcagactttaaaaattttgcgaaattataaatatttctgttctcactgcccaaaagtcccataaagccatctatcgtctcttttctaagcattgccggacgagggctgtcaatcaactcagccgcccttcctatactgccattgctcataacagcttttgcggccgcttcttcatcagaaagtttatatttgtcaatcaaaaagtcagatacagtcttgtttggcaatgctgaaaattttacaatcgacgcccttgataaaatagtcggcaaaaatttatttaaattttccgctatcataattatagtgcaatatccgggcggttcctcaaacactttcaaaagcttattttgggacgctgcgttcatagtgtccgcttttggaactatataaatcttacgctcagcactgtatggctttataaatatatctttcctcatttcgctcacagtatccactaatatagaatcggatttactctcaactccataaagactgtttgtaaccgttataatatcaggatgctgtttcaggtcagtcttaaccgcatctgcagcaaacgcccttgcagtggtatatctgccgacccctaaagggccgcaaaaaatatatgcgtgacttattcgtcctgtcttaacagccgtttccagaagcttttttacactttcatgtccgtatattccgctaaaatggctcacgaaattaaccttcctcctcaatttgacctgttttggagtttatactgtttgacacaacggctattttttcaatatccgtatattccttgagatattccacaacgctgttgtcaattatttgacccggcaaaactatggggcagcatggaggacaggaattaacaatttctgcacaaatctttccaatagccgattcggccgaaatcataacgctgtccgagaaaaaagcttctttcataggcatttcaaatctcgtgtgcggcataggttttggttttttaatcacctgaggtctatactcagacttagatatatcggttatagccctgtcaataagctccaaatcctttttcgttgtgctagccgttatatataaaagaacatttctctcatcggccatttcaggataaattccataatcctttttcagcagttcggcagcgccgtatccggttattcccagttttgaaaagtcaactgccagcttagttatatcataatcattatctaagtttcctctcgtcatgcacgaaaccttatccaaaactccaattttagattttattgctgttactgtctctattacccgattcagctgctttccatattcatttgacatttttgaaacagcttcatcaatactggcaagcaaaatatatgacgggcttgaagtttgcagtaaattgatatttcttctcagccttaaaacatctactaactccgtgtttcccacatgaaggagcgcggtctgcccaagcgccggcaaagtcttgtgggcgctatgaataaccaaatcagctcccgattcaagcgccggttttggcagctcgtcactaaaggcaaaatgtgcgccatgagcttcgtcaacaatcaaaaatttgcctgaggaatgtatgttttttgccaaacgtttaatatcagaacaaatgccgtaataattcggagatgtcaaaactacgcctacagcgtcaggattatttctgagtgcgtccataaccgtgattggagacatagctccatatattccaaacctttcaatatactcgggttcaataaaaataggttctgcaccggcaagtatcattcctgaaataaccgccttgtgacaagttctgtccactatcagcttgtccccgtttcttaccgctgtcaatacagcggcttcaattcccactgttgaaccgtttaccaaaaagaaactttttttggctccaaaagctttggcagcacgctcctcgctttttaaaattataccgtttggattttgcagattatccgtttcatcaaactccgtaacatcaagtttaaacgcattgcgcttaaagccggagctcaaccctgctccgccgttatgacccggcatatgcgcccgaaccctgtctttttttataaactttaaaagctcatcctgcaaactttttttaaaaagcatttataagcacccaatctatgatttattaaaatgcaattctctctctgatataatccgtcaaatcttctattttaactctttcctgttccatcgaatcacgatggcgcaccgtcacgctgtcatcatctcttgaatcgaagtcataggttatacagaaaggcgtgccgatttcatcctggcggcggtatctctttcctattgagcctgattcatcatattcgcacataaactcagacgccagcttctcatagacttttacagcttcctcggaaagctttttcgaaagcggaagcactgctgcctttatcggcgcgagcgccgggtggaagtgcataacaactctcgtgtcattcttttcaggatcgacaatctcttcgtcataagcgtcaactaaaaacgccaaagctactctatccgctccaagagacggctctatacagtaaggaatatacttctcgccgctttcagggtcggtatactccattttctcaccgctgaactcgctgtgctgttttaggtcaaaatcagttctgtcagcgattccccaaagctctccccagccaaacgggaaaagatattctatatcagtggttgcgtttgaataatgtgacagctcttcagggtcatggtctcttaaacgcatattttcctttttaatccctaatgataaaaggaagttttcacagtagtctttccaatatttaaaccattccaaatcggtgcccggtttacagaaaaattctaattccatctgttcaaattctctgattctgaaaataaagtttccaggtgtaatctcgtttctgaatgatttgccgatttgtcctataccaaacggcagcttcttgcgggatgttctctgaacgctcttaaagttcacaaaaatgccctgagccgtctccggtcttagatatatttcactggaactatcctctgttacaccctggaaagttttaaacataagattaaactttctgatatcagtaaaattatgctttccgcactcgggacaagggatatttttttcatttataaactctatcatcttttcatcagaccaaccgtcggctatctctccggttgcgtcctctatcagtttatcagctctgaatcttgccttacaatccttgcagtccataagagggtcagagaatccgcccacatgacctgaagccacccaaactttcgggttcataagtatagccgcgtcaagtccaacattataagggctctcctgaataaactttttccaccacgctctcttaacgttgtttttaaattcaactccgagcggaccataatcccaggaattggctaatcccccataaatctcagaaccgggataaacaaatcctcttcctttacagagcgctactattttttccattgttttttcctgattttgcacctaaatcaacctctctctatcatattaaacaaaaatgttaaaaaccaaattcaacggttttgcacaaatccgctattttcacattatactgtttaattataatataaacatacatatttttcaagagtaaatttaaatttactctttaaggtgaaaaacattgacttttgcaataaatatacattagctttataacaaatatattaacaatccgctatcttaaaaatagcacttaattttataaatgaaatttttatatgtatatcttcgatgtagtgaataaaaatttgataggttgaaaaaattgaacataaatattaaaatcacatatggcgaacatcggaagggtgtgcttgcacaccacgttaggtgagctgccatatcacgcggagcgtgaacatacttaaaaaagtttatcattatcctttttactaataaatttttccacgactgcgcgccttacgcggcagatttcatctgccctccgatgcttgcaaaactgctttatctataaaatttttttagaataaatattccaaaaagtcgtgttttttagtgaacatcggaagggcgtgtttaacacgcctcgttaggtgagctgccatatcacgcggagcgtgaacatacttaaaaaagtttgtcattatcctttttactaataaatttttccacgactgtgcgccttacgcggcagatttcatctgcattgcgtatttatattattgacattgaaggctaacaaaaacaagttaatatgtataacacccacttttaagaaaagtggggtcacacctccgatgcttgcaaaaccacttttttataaatattttttagaatcaattttccaaaaaatagtgtttcttggtgaacatcgggagggcgtgtttaacacgcctcgttaggtgagcttccatatcacgcggagcgtgaacatacttaaaaaagtttgtcattatcctttttactaataaattttccgtgactgcgcgccttacgcggcagatttcatctgccctccgatgcttgcaaaaccacttttttataaatatttttttagaattaattttccaaaaaatcatgttttttagtgaacatcgggagggcgtgttaaacacgcctcgttaggtgagttgccatatcacgtgaagcgtgaacatacttaaaaaagtttgtcattatcctttttactaataaacttagccgcggctacgcgccttacgcggcagatttcatctgccctccgatgcttgcaaaaccgcattttttatataatatttacatcattgaaagcccaggcacgtctctaattgtaaagataatcctgcataaataagtacctaaataaatctccttttaataaattttgtagaatatagttagtttataacatcaaacaattattcttgacatataatgtatagttgttaatatagtaaattaataatggagagtgataatatgaccaaaagaatttataaatactttacatgcgctaactcatcagtaggttttgtaagtttctttgaacaaaaccttgacggacttgaaaacatttatattttaaaaggagggcccggaacaggaaaatccacaatgatgaaaaaaatcggagactattttctgagccagggagaaaatatcgaccatatctactgcagttctgattcaaattctttggacggtatcattatcaacaaccggaaaacagctgtggttgacggaacctcacctcacgttattgaacccaaagctccgggagcagttgaagaatacataaatcttggaaaggcatgggacagaaacaaacttaaacagcataagtccgaaatactggatattaaacagcaaatttcaaaattatataatggaatatattcaaatctttcaaaagccaaaacagtccacgacgattgggagaaaatatatcttgacaatatagattataacagtttagacagtgccgcaattgagttatgcaataaaatagttgacagcgaaaaatcaaatgacaacggcaaaataatagaccgtttcttcggagccttaactcctaacgggtcagtaaattatatcgagaatttgacctctgacctctcaaaacggtattttattaaaggacgtcccggaacaggaaaatccacaataatgaaaaaaattgctaatcttgccaaagacaacggctataaaacagaagtatatcactgcagctttgaccccgatagtttggatatggtaataatacgtgatttagacgtgtgtatctttgattcgacttcaccgcacgaactgttcccgtcacgcacaagcgacgaaatagttgacctgtatcagactgcagttaagcccggaacggatgaagaaaactcggcaaggctgtccgccatccaaaacaggtatgataaattaaacagccaggcacgctgtttcctaagcaacatacatactctgcacgatgaacttgaatcaatatatattaacgctatgaatttcgatgtaataaacagcataacttctgaattaatcaataatattgaggactgtcctatagtatgttaatataattccaaaaattcaacagtcttatatttattgggcaatacaaatttgccatttatatttaattaacaaaaaagcctgcaccaaacggtgcaggcaatttttataattattaattatctctgaacacggccgcttccgtcgccgccaacaagattttcaacgtcagcacgtgaaaccaagttgaagtctccgggaattgtgtgcttaagcgctgatgcagcaacaccaaattcaagtgcgtctttaaaattcttaccgtcaacaaatccgcagattgtaccgccggcaaatgaatctccgccgcccacacggtcaacaataggatgtactctgtactcttttgaatgatagaactctttcgtatctcttgaatagatacaagctgaccagccgttgtctgatgctgaatgacttacgcgcaatgagctgataacgtactcaaagttgaacttctcaaccatctgcttaaatatgtcctcataaccggcaagttcaaggtctcctgatgtaacgtcagtagcgcccggcttaaatccgagaaccttttcagcgtcttcttcgtttccgatacaaacgtcaacatactgcatgagatttgacataactttctgagccttctcacttgaccaaagctttttacggaagttcaggtcaacagaaaccttaacgccctttgcctttgcagctttcaaagcttcctcagtcagttctgcagcagcgtctgaaacagcaggagtgattcctgtaaagtggaaccaatcagcgccgtcaaaaatcttgtcaaaatcaaaatcagcagcttcagctgtagaaattgaagaatgagcacggtcatatactacatttgacgctctcatagaagcgcctgactctaagaaataaatacccagtctctctccgccttttgcaatgttatctgttttaacattcatcttacgaagtgcagcaaccgcacattctccgattgggttatcaggaacctttgtaacaaactcagcgtcatgtccgtaattagcaagtgaaactgcaacgtttgcctcgccgcctccataacatacgtcaaactcatcagcctgaataaacttctcattaccaggtgtagataatctgagcataatctcgcccattgtaacaactttagccattataattttctcctttatttgtataatttaatttcaaatatgtactaattatcttttcaaattatctcttcaaaaacttaaagtgcagcgcgcgcttctttaatctttgctataaactctttagctgtagcagtaatatcagcatagtcgcctgtcttagctccttttgtaagagatgaacctgctccaactgcaactgcgccggcctttatccacttatcaacgtttgatacgtccactccgcctgtaggcataagtttagcgtgcggcaaaggacccttaacatccttaataaagttagctccaacaatgtctccggggaatactttacaaatatcacatccagcttccatagccgtcaagatttctgtgattgtcatacatccaggcatgtaaggaatctgataacgtccgcataactctgcagcacccttgttgaaaccggggcttactatgaaattagctcctgaaagaatagcctgtcttgctgtctcggaatccaaaacggttcctgcgcccaaaagcatctcgccgtttgtgtattttgaagcaagagcctcaataaccttagcggcacccggaacagtaaatgttaattctattgaagggcagccgccctccaggcatgcgtctgtgattcttatagcgtcttcagcattagatgcacgaacaactgctacaagaccagcatctgtcatttttgttaaaacttgttgtttatccataattaatcctcctatatataaaataattctttttcgaacaagccccaaataccgaaacattcgggttcacgggtccctcttcccgcactttgtattataactcaacatttcaaaatacgcaacattaaattaaatcttttttacagtttttttatttattttccaaaaaaagtaataaaaatgccatacaatgtaaataaacagttaaaataaaaatttattccatatttcagtatgtgattttatgaaaaagtcaccgcagtttaaatatgtttttgttacagtatacaaaattagacaccactcggtttttctccttgctttttgcttttatataagttaaaatagattacatggtgcaatttagcaccaggcagaattatagtgttttttcggctttattttaaaagcataagaactctgaaattaatttttgcacatatttacttaaacataatagaatataagataggaaataatatctatacggaattttgccttaatacataaatacaggagggctaattatgagcgaaatcaaaagaatcggtgttatgaccggcggaggcgactgtcctgggcttaatgctgtaatcagagcagttgttaagacggctatcctcaaatacggtcttgaagttgttggaataaaacatggttaccgcgggctttatctcggtgaagacgagtttgttccccttactcttcatgatgtttcaggaattatctctaaaggtggcacaatgctttacagctcaaacaaagataatctgtttgactattcatatattgacgaacacggacaagaacagcgcggcgatgtttcggatgttggagtcaacaacctaaagaaagccggtattgacgctcttattgttatcggcggagacggaactcttacgtccggccgtgattttgcgcgcaaaggagttaaagttataggcgttccaaaaacaatagacaacgacctagcttcgacagataccacttttggttttgataccgccgttgcaaccgcaactgaatctattgataaattaagaacaaccgccgaatcacacagcagaaccatcgttgtggaagtaatgggcagatatgccgggtttattgctatagcatcagctatagccggaggagctgacgcggctttgataccagaaataccatacgatattaataaagttgcagacgctattaaagaaaacagagccagaggcaagaattttgctattgttgttgttgcagaaggagctaagcctattggaggagacgtagttatatccaaagttattgataacagtcctgacccaatacgtctcggcggagttggagaagtaatcgccgggcagcttgaacatttagccggtctcgagtgccgcgctactattcttggacatactcagcgcggaggttcacccacatctaacgacagaatcttgtcaacccgttacggttcatacgcggttaagctgttgatggaaggcaaattcggcaatatggtagttttagacggaactaagcttggttatgactctcttgaaaacgtaatcggaaaaaacaaagctgtagaagagagcggttactggataaaaactgcaagagctattgatatgtgtcttggagactaacaaaaaatatatttacattttttgaaaaaagtgttgcattttgatttccgttgtgctataatagacgacgttgctaattaaatggataaataattgagttatatattgaaagaggtgaaacacgatgaaggaaggaattcatcctgattacaagcaaacacagatcaaatgtgcttgcggtaacgttattgaaaccggttccacaaaagaggacatccgtatagaaatttgttctgcttgtcatcctttctacacaggaaagcaaaagcttgttgatacaggcggcagagttgataagttcagaaaacgttatggtcttgaaaagtaaaaaattagacactgctgattgcggtgtcttttttatttaaaaacaaaagggctgagtattgacgcgccctcccatcgttagatttttagtctgactttggtgagcacatcatctttcagccccatttttattaatcttcatctatatctttaaagaatatgtatctgttcttaccattttgttttgccttatagagtgcaatatcggcttttttatataattcagtataagttctcgcgtcactgacataaagggcaataccaacacttaaagttaaatttcttaatttatcgccggactttacaaatgtatcccgctccatgattttattaagaagctgttccaccttgacgccgcgctcatcaatatttctgcaaaataccatgaactcgtctccgcctatcctaccgacaatacaatcatcataaaaaatgtctttaaacaaaccagcaactattctgatagcttcgtctccgataccatgaccgaacgtatcgtttactgatttaaaatcatcgatatcaaataaaatcagagcatgattttgtgttccgcggtctagtatagtgttttctataagctgctgagtaatccctttgttataaagccctgtgagcgaatctctagaagctttatttttaagctccatttctttctgaaactgttcttccacatcaataactattcctaccgcttttacagggacattattattatcacgcaccgaacttaaaactaacctgttatgactgtaaatcccctgaaaatcctttaatttcagcaatatttcaaggttatcttctattccctctcttaggagttttaaattatcataaagcacggatatatcatcaggatgcacaaactttttcaaaatagttttttcaattttaaaattttcatcaaccataaatctgcgtgaaaactggtcggaagcctcaaacgtattttttatcatatcccattcaaaaataccgctgttgatattctccaatacgattttgtttcttgcctctgccagctgcagtttctcctgcatatttttttcacggcttatatcgaataaaacagtatatacaacagtttccagcttatcatttttctttaaatgacttctgctggaaacccaaatacggcttccatcacctctgagaattttatactgagcctctgaaaaacccgtttcgcgaagcatgcgcttttgtcttccaaactcccgcctagagtcgtctcccaccagcagacgaaaaaattcacatcgatattttctttttatatcatttttttcataacccagtatgctgtaaaagacaggagtagcatttattattgtaaaactatcgtcgaagtatgttaccatagttcccccgacaacatttgtcatgatttccgtatcctcatcgacaacattttttaattctttaaaaatccgtattgcaaagctaaaaagacagacggaaaatacaatcacagctgtctcaactgcaacaatccactctaatccatgcgccgagtccccaaatattaatcgaattaagccaaaagcaaaaaaactaaatatgaccataaaaacaacgcaccatactacgcgccacactagctcaattttgggaatttttttaataatattaagtttctttttcacttcattctgctgacctgatatgttatcgtattctagttttctggctgtgtcagtcataattctatcacctaacaacaccttcgtttccagattattccaattatataaataacataataacacagcttacaaaaaaaagcaaatatatttacacaataatttgcctcattaatttactaaaaatatagaataccaacaaaatataacaaattaaatttaattactaagataaattaatttacgataataaagtgttataaaatttacttataattatgtaaaaacagattttaatataactattaatagttatattaaagtaatattataaatattattttatttcactgcgtttaaactttttggacgctaatatccccggaaccaaacctgacaaaagaccaaatactaaagagagcaagaacaaaaaaacagtcataaataaaagtccgccgttaaaatacagaggattaccggttaagagacaatataggcagccggctccgattcctgccgccaaaccaactaatgttcctgcaatagaaatcaaaagacaaatatactctaatttaagaaaaacatatgctgaaccattctttttgtttgtttgatctaaatcagtttttatggttcttgaaggataagcggcaaacatggccaaactgaagcagcttataattagtataataagaaaaactataagaacaataagccgaattacgctaaccataccgctgttataatttgattttatcgagtatttagaattatccgagaaaaccttacccatatagctttccgcttgattaaccgccctatctgattcaaacccatccttacacacaaaagtataggttccaacgtcagttgaatttaaaataagcctggcgcttttgtatggtataattacggtttcattcagcgacgatttgctttcgctgtcgaatatacccacaacgctaaaaatctgattatttatttttaagtcctgtcctatagggtcggaatcaccatacaaacttttagcaatatcactgccgataactgcaacatgagttcttgccgttacatctgctgtcgagaaaaaacggcctttatcaatagtcaaagccgaatgattaaaaaacgaatagtctgttgcaagcacattataatatgaacttgtactcaagttaccaaacatttcaatattagaaaccgtctcagttggcacaacgtctataaaatcatcatattccaaaatagagcttcttaagccgtctatttttactttagatttttcttcatttactgtaagagtaatagtattagctcctaaaggattagtcctatatccttcggaaattatcatagaatgcgtcgctattataacagctatcatagaagcggccgcaataagaaagcctgccgccgatataagcgcctggattttattcagctttatttcaaagagtgcgtttttaaacgcactcttaaatattccgctttttttatcatttaatttttctttctcattattgctcatttacgcatttcccctaaaaacttttactctaaatcggtaagatcttcctgggtcgctgattttccggttgatttgacattttcaccattatcgctttcagttgtaaactcttcatcaattgagtctgcgtcaccactttgtgatttatcagtttttgaagaattttctgaattgttagatgaattttctgcttctttattcccggaatctttacctgaattaacactatccgcaggcttaacattttcaccgtcttctgctttgtaaaggactgtatctccaacagacagaccggaaataatctcaacattagtgccgtcgctcacgccatactgaaccttaacaagcttatatccttcaggaacatttatattcggatattccgccggattcatcacagcgtcttcttcagcactgttagagtttgtaataaccaatgcgtttgttccgtcagactcatataaggtgcgttcaggaacagacaaaacatttattgctgaattaattattattttggcgtcaacgttcataccggacttgatttttcctgggtctgaaattgtaatttcaactgcataagtggtaacgccgtcgccctttttctcaccttcgccggcaatattcgtaatctcaccgctgaaagtctgacccggcaaagcattcgctgttataacaactgtttgaccaagttcaatattccagatttcaagttcatcaacttcaatattaaacttcattttactcatatcagcaattaccattaacggcttatcagtctgattagcgttcacgttgtctcctattttcgcattcttaaccagtattgtgccgtcgataggagcagctattttatatttttcaagttccttgtttgcctgctctaaagcaagttcgcaagacgctatatccagctcacgcccctcttttgaagaaccgctgccgtcactttttaaagtcgcaaccacttgacccgactcaacagttgaaccgttcctgacatttactgactgaactgttcctgtaacattcggtatcaaggcaaattctgttccgtttgcctgcgtgatagttgcaatcttaccgcctgttatactgcttccggctgaaatattcaagtcgcttatagttcctgacgcgttagcataaattctaagctgctgtgacgaacctgaatctgaatcgtccaccttagcacgcttaacatcattttcggccatttgaactgccagctgtgcgtttgtatcatctattttataaaccagttcaccggcacgaacctgctcccctgcgttaagaggagtctcggtgatagttccgctgactaaggaagttatatcatatctggcgttaggctcaacatttcctcctgctgccatagttttaatcacgttgcccttagctacatacgtttgtgtatatcccataagagggtccatacgattccagaagaagaaaaccgttccgacaataactaaaactacagccgcagctacaccggcgcctataagccattttttgcgtctcttgcagaaagctctaaaacctttatcagacaaattttcttccggttcatcatccaaattatccaaatcaaaatacgatgtctgcgttaccttaggacgcatattcttcggagcatatgcggagtaaatctcttctttatctatctcactgtttattggaattgtttgttcaagttccctcgtatcagacaaactattaatatctgaaccgttattcccggcttcgtcagatacagaaaaagtttcttcttgtgcttcctctgaaatataattatcagagggtataaaatctcgtccgtattccgctctcctgtcagacaattcgtctgcagatagattctgtgccatatcagccgcagcgctgatagcttcagtatccatttccccggtatcgccgcctaggttatcatatgccgattcagggtcaaactcttcaatttcgcttatatcttcatcttcgtttatatattcatcttcgtttatatattcatcaaaatctgaattttctccgctgtcttcaatatcttcatagtccgtttttaaatctaaacttttatcttcgtcatatctatctccgctgttttcaaaattatcctgttcaaaaccgatattctcatgctctgaagcttctttcaaaaatttgttttcatcgttttctgcgcgatcgttttcatactctctttcatgaacgccaaaagtgccgacaggctcaccttcggcaatcttattttcagaatcggtcttataacttacgctgttttcatctaaaattctttccggattaagatgctcttctccaagactgttataagcgtcatttaagaaatcctgttctatattatctttgtcattgttttttttggaaaacaactttttaaaaaaatccattcgttttccccctgtatgtaataggccggacctcaggcattcaaacccacttttcccgggtattaatatccaacattatacactgctccatattaaccatgttattttatcaaaaatattccaaataaatgttaagtgaatattaattttctattaccattagttaaaaatattttttgcctatcaagacaaatttatacagtatcaacgcacatatttatcggctatatatttattcgccttgttttcaagttcgtcatccaggggcttaagtccatcaaaatcgtcatattttcgctttaatgcacattctaaaatataatcgcatagctgaggatttttaggaagcaaaggtccgtgaagataagtggcaataacatttttatatattacgccctcataaccgctgtctccggtatttccattgccgaatttaacctttcccagcggagtgtggttttcgccgatatatgttcttccggcatggttttcaaaccctactataggctggtcaaacttttcgcactctaaaacaacattactaatcagcctggtatctcccgcgtctgtatatatatccaaaattcccaatccttctattttagtattggccgttttataatatttgcccaataactgataaccaccgcaaacagctaccaaaacgccgccattttccacatacgcttttaattcttcctttttttcgagaagcaagctgcaaactatctcctgttcacggtctgaaccgccgcctacaaatataatatcagccgctttaagatcaatgctgccgtcctgatttgtacacatatgaactttagcgtcaattccgcgccacttcagccttttttccatacaggctatatttcctctgtccccgtagagattaagcagatcaggatacaaatgaacgatgtttatctcataattatttcccattgctgctacctcctgcactgaccggaacaagctcgctgctgcccaattcttttttaagacccaacattgtattttgggtaggatataacgctgtatagtttacgagaacataacatacttctgaatcaggattgtccacgcattttttaagcgccgatttcatatcagaggtaatcatatcaacctttatatcagcatatttaaacctgagagaaatgtcgtaaagccttatcccggtagtaataagactgcataaattagcttctcccaatttatcaaagtcaacatcccaaagccatgacacatcccttccatcatttgcgaggtcgtttatagccacgataacatccttttttctcttatccaaaagcactgtctgaatagcttggttaaacccggccggatttttggccaaatttaatatacaaggctttccgcccagttctatcagctccatacgtcctatctgaggcttataatcactaagtatactgttaaaattctcggtcttaacacccataacatcaagagctgagtatactgccaaaatattatatatattataaaatccacggtaattcacatctatttgattattacctacagaaaacttcatagacgacgacaagtccacattggttgccggataattaatctcaggtctcttatttccgcagtgaggacaatagtagtcgcccagctggctgtaatgaaaataattatactcctgttcctgtccgcattttgcgcaaaaccgcccctccttagtttcatcggtctgtggaagcacctgttccgagataccaaaataacgagcgtctctgccttcgccaaactgagcggtcagcgggtcgtcgccattcaatatcagcttaacatctcctgccatatcaatagcttcattaagcaaatcaactgttatatcaatttctccatacctgtcaagctggtcacggaaaagatttgttataagcatataatcaggtttgatgtgtttaaacactcgccttgcagaagcttcatccacctcaagcactgcatagtcagctttaaaattaccaaatatattacacgcttgagcaaaggttgtcgctatacctccgaccatattagcgcctaagttattgcaaactgttttatatccgctttttatcaaagcagtattcagcaagttatttgtagtagtcttaccattcgtgccgcatgtaacaatcacgccttttgtgacattcttggctaaaatacttatcaaattggggcaaattttaagagcgcacacacccggcgttgacgatgattttttgccaacaatcctgcctgccaccgacgcaagcttcgccgcccacacagccaatagttttctcattaaattcatcctttcggcataatacatttaagaaataatttactccgcgtccaaattcttttaaagtacattatatctgaaaggtgaatctttttcaagagtattagtatcaaaatttgcatactaatacgttaaagtttgtgacatttatgttaaatttattatttaagttcatttaagaagtcagctatacattcagcggcacagctcataccgtacttagcctcctctaaactgtttccgcttgaccccatctcaatgataaggcttccgtgggttgtgtgtccgttaaacctttcctgccttaagtttacatgcctcattaagttagggtatttctggtctattttatcctgcagtttcagtgcaaatttcaaattctcgcgccagtccggatgatacagccctttttcgttagtgcctacaacaaacattagctgagccgcatttttaccatttatttttgtaaccacttttgcctttgtatcatcatcataaactattgaatctctatgcaggtcaaaaacaacctgtatgcttggatactcagacaaataccactcaatagacgaaagtgcgtccgcataagcgccgttaaatgacggataatcatgcagcgctgtatcatgcaaggtttcaatgccgcggctgttaaatatttcagtaacctcattgcctaccgctacgacattctcagtattctccatgctcctgtcgctctcctcgcggttatacttttgagctccttcaggagcatatgcctctgtcgcatgtgtatgtactatcagaactttcggaccgtcgacgctcatatcaatatcaagcggttcgctcagcattttatttatatctacgccgtatgaagtttggttccctattttaatctcattggagttgctgtttgcgttctgacctgcatttatcgcttttatgtccgcctgattctcaccgtcggccgacgattctgctcccggtgttggctgaggttcctctgtcgggacaatattgctttcgtcaaattcagaagacttctgaaccatttcataactgttaaccatatcggctccatgaatttctgcagctaaagccccgttaatattgtatgggtcaaaccctaatatgtatgaacaggcagtttttaaaactgaatcaaatgactcctttatatttatttttttatcagacctttcttcagatttttcttcgctgtcctgctttacattttcctgagccacctccgcagattgcgattccgtaacatgagacgctgtcggaacagctgttttagtatatgaaaacgatgttattataacgccgacaataactccgacagccgctaaaaaaactgctgtttttataattttatgtccgtcgataacaacagcccgatactgatgtttttccggaatttttcttgccttgtagcttctctcaatcatttcttctcctccacgcttgtctgaattatatctcttaatcatattcatgataattttaaatatacatagataagcaaaaaagactgcgcactgaacaagaaatattagatacaatttatatcaattattgaattgaaaaacacgccgcgcgtaataaaaaagtaacttgataaatatcctgtatcatgatataatttctttgtaaaatcctgtaaaaaatgaataaaaaaatatattataatataaaaaggagtaagaattatgacatgcaaagattttaaaaatttatctttaaatcagcttcgcggtaagtggggcaaggctataattgcattgtttgttgcaactctggtagttatggctgtcagcattgtagtaaactttcctgcgcaaatgactgcgaatttgattagtatgggctcaaatgtatcagccggaacgtttatatttgtaacatcctactcattaatcggcactattgtccttctgtttgtatcaggatgtatgacgtacggtatgagcaagtatctcctgaaccttgtaagaaccggtaactcggagttcagctacatatttacaggattttcttatggatttaatacaataatgcgttctttcctgcttatgctcttaatcgggatattcacattcctatggtcattgcttttggttatccccggcatcatagcgtcatacagatactcacaggctttttatctgcttgcggacaatgatgatatgaccgctcttgaagcactgagagccagcaaagaaatgatgaaaggttataagtggaagttatttgtacttagcctaagctttatcggctggattttgttggccgctgtcacattaggtattggctacatcttcctatcgccatacataaataccgcttatacaaacttctatgagtatctccgcggtatacgcgataacagccaaaatgtacagactgcataagataaacttagttattaggatatataatatgaaaaaaactttaaactttcttagacgctctctcggtatatcactgtttttactgtttattatacctttttgcacaccggtgcaatgcgagagtataatggatgaaacggtcagcagaatgggtaagctctgcgagacgccggatttcagaatatactatgaggcaaaaaccgaaaacagatgtttttacggagcaaagtttgaatccggcagtggggtgtaccatggtacaccccacgacgtgtcttatccttcgattcctaacgctatagacactgaatatttttggtttgattcgactttaacaaatgacgtatgcgaaagagctgaaatatctgaatcttccgaaagaagcggaaaattcagactttataattggaactgtgcattaaaagacgaagttattgaacctgcagactatgaaaactacattaaaaatactatcgataacatagcctcagacggtaatgacagccttttggtatttggcaaagagtttaatataaacgataattttactcatcctgaaaactttataaagcttttcagatatgtagccgactatgcccacacaaaggataatattgcggttgtttgggcgccgaataatgttggttcagtcgatttaagactgatagatttttatcccggcgatgagtatacagactggattggtatgagtttatatgtaatgccatactttcagggaagcaaagcacagacaacatggtcaaacagcgtctctttcgtagccggcgactacagcaatgctgtaataggagctaaagtaataactgattttatggaaacatataacataaaaaagccggttgttataaccgaaggcggtgtaggttacggcgaaatgcccggacgtgaagactacataaacggttttgaatatgttgactgggcagcacagcagcttagaaaattttattatgagattccgagagtgtttccgcagattaaaataaacgtaagctttaaccataacgtggatttggatttttacagatatgacatgagtgattcgccggaactttactcaatagttaattcggcggtttcaacccctccatacatccagggatatccgggattttctcctgtcgagtatcccgaaatgcacgacatagaagttaaagacagtcttaaattatccgcctactcctatgaacccaaagcgttgtatttaaacgtcaaatacctaatagacggcgttcctctctatgaaacactgtatcctccttatgagtttactcttgattcgtcaaacttatctgaaggaacgcatacattaacggttgaaaaatattcttcaaaccaaaaacttgactcaaaagatttcaaaataacttataattcaaaagactcaaatcaaacagtcaattaccctgaagttcctgtatttataaatggcgaggaactaatttcagaccagcctgcttttattattcacgacagaacaatggttccaatgcgcgctatatttgaaactttgggaaccgaagtaatttgggacgagacaaatgaaacagtaaccgcaaagaaaaacggcaccgaaatatcactaaaaatcaatgataataaaatgacaaaaaacggtgggaaaattgaacttgacacacctgctatactgttaagcgaccatacaatgttaccgctcagagctgtatcggaggctttcggagctgcagttacatgggacgagcaaaacaggattgtaaatatcgaatttattgaataacataaaagcggctttataaaaggccgcttttatatattatttaattttcaaaatcaaattggtccgcattacgcttcttaaattcctgataaattctctccgccaaattttcatctacaacctgagacaaacaatcctcactctcggcagccttatctattttaaacaatacgatttctgtaacttcttcctcttcttcattatatggaatacacactatataatcctcgccgtcaatttgcacagtatccaaatgctcaaaaggcaccgtgtttccatcctcatctactaattctaaaatattttgattttcttcctgcattacatctttattttcatctgacatttttactgctcctttctcaacgtttgctgtccagatacgattgtaatataaaggcggcggaaatactgtcgacagactcttttcgtttctttcctctgacgtttgtaacgttcattaaattatgagctgaaacggtagtaagcctttcgtcccaaaggataacgggcacatctaccaactcttccagtttttcaacaaacattttagtcttttctccgcgttccccaaccgtaccgttcatgttctttggaaacccaactacaatttcggaaactcctaactcattcgaaagtttagcggcatattcggcaactttataaatgcttccagacttaaaattatccaaagtgccggcgccgaaccccaattcatcagatactgcaaagccagttctgctatctccgaaatctattcccaaactcttcatatacggttttaatcctccatgtttacaatttccaaacaaaaattaatatcaaagttataataccattattcctaaaatattacaacccttttatactataaatctttcaaaagaactgtttttttcagtccatataggagaatactcttcaatattatcagaagtatcaaaattgtttggagtaatagggtttgacatcaggaaatatttaagcgcgtcatataaatgatcctcctgttttgtatcaacatcctcagggtttatactgtcatacttcagttccggcaaggttcttatcatgtttgaacatttgccttcaaaaaagtaaagcattggaaaaccttcagcgtcaaaagccagcctgtaatgcacctgcatctttcctgccagtctgtcatttttccctttttcaaaatatactccgcgtttttccatcatctcagcaatgctcccctctgcgcttcctgtagcgttccatattgccggatccgcaattccggttatcttacatccggcttttgtctcatcttcttcaagttcaagtatcttatcggctattttctgcgccgtccatcttattccaacatcaggctttccggcacagccgtataactcacggtaattatatgctctgccgtcataatccacagcataccatgataccgcaaaaggcttggaataaccaaaatcaaacgccctaaaccttctccactctttcggaatttcaaacggttttataacatgactgaattttcttgatttatagcctcttatgtcgtttttccattcggtaaacacctgaccgtcgaatatatcccattctccgaataaaagcgcccggcgttcgttttcaggaagctgttcaagcctttttatatagtctttatccaaattcatcaaaaatttattatcctgaacaaaagacggaataaacaatcgtttagtatcaaattcagttttatgctcaacccctggctcatatccgtcaataaatcttcgcttgacccaattatgccctattccgccgggatttgtgctggattttatctgttttggatacccgtttgttcccctgacgcgcgataaaagatatgtatattggttctcagtaaagtgagtgagctcgtcaaacctaactatgtcatattcagctccctgatatctcagcacatccgtctcagactgacaaaatccgaattcgatgaccgagccgtttttaaatatccactttctggaactcaccttataagaagccacgctggcagggtatatcaaaagagaattcattattaaagaatgctcaagttcaggaaatgttcttctcaataccagctgtatacttctgggatatttcaaggcaaataataaagcgtcaactaattgtccgtatgacttgccgcctccggccgcgccgccgaacagcacttcatcagcttttgactctataaatttaagctgcgtctttgtgatttcaagctttaattttgaatccatattgtataccccatcctatataacctttatttcaacttcaagctttgttatttcattttctcccccaagttcaccgggcataccaagctgacctaatatctccttagccgcagataattcaattcttttgtctccgcagcagagcagttcctgtatcttatttaaagcttccatcgctctgttaacttcctcgctctgttttataacatttgtaatttccccattatttaaatctttatttatatattctttggattggtcgtttttattattatgattctcattaacaaactctgccatattattctccaaccgtctcgcctattaacttttcagccgctctttcaagtattctgaaacattggcggcggctgtaaaacataacgaattccatagagtcccaactgttgcctttcaaatatttttcagttattaatgttatctcttcgctgtctaacaattttgaaagtctttcccaatccttcagcagtttatcatattttttcttgcactcctcaatctgagaacggtaaaaatgaacattgttaatttcacctttatatgtatttttcgataatccatttctcactatttcattctcagtatattcaactcttgtaaaatcatttattagctgattataaaaacttattttagcattcatttcttttctcgcaaccggcagcaatctcagccactttttgacttggtctgcatttgaaaatttcataatatattctcctttcttttattcacatttactcctgtgaatcaatttcatagtagttatggcagcattcaatattacaaaacaaaccgtcaaagctcttgatgaacccctcatcgccctgaaaaacctcactgccgcaaaacaggcatataccgaccggcctgccgcgttccagctcccctctggtataaccataacgttctatatactttatgtcgggatgcgtcatattcatattcctttcttattaaattttgtgatttattttcacattgcttttaaaaaaataattttttatcctatataaatgtttataaatacctgatttaaaatataagactaacattttttacttacacattattaccataaacaccaaatcccaacattttttttgttatcacaaccattatataacaaattttttatttgtcaaggataaaataacaaatttttcgattttattccttgattaattctacaaaatgtgatatattatgacaggaggtgattatatggcaaataaaaacttgagtaaaaaactcaaacaggcacgatacaattccggactttcccaaaaacaggtctatgaaaaatttggtataaaacaagctagattcagcgcttgggaaaatggcatttccgaaccggacgtcaaaacatttcttgaactctgccgggaatataacattgatgacgtatacagttttttttgcgacgcaaatactgaatacaacaaatttaaatacaatactgaactcaatctagctatcacaaaactgcgtgaaatctctcgtgaccctgaaaattttgaagcagtacttaattgtttaaattatgaatacaacaaatatttggataaacgagttattaaatttcataacagaatgcggcctatacctgtatacatgcagccggcagcggccgggctgggcaattatataaccgatgatgatatggaagtaatggaattgcccgctcctccggaagcagacgccggaatacgtatttcaggcgacagcatggaaccggatatttgtgacggtgaaatagtttatatcaaatatatgcctcacataggatttggagatataggaatatttctatacaatggtgacgcatattgtaaaaaacttgataaaataaacggccgtccgtgtctaacttcaatcaatcccagatatactcccatatttttcaatgattctgaatctatctatacattcgggaaagtaatattgtgattacgaaacttgtgttgcattttgtatattcgcagtttttacacccaccgcagccggcttgtgctgcggtgattttattttttcaccattaacttcaagctccgtatttatgttttcttcatactcagcctttaaatttttaagtccttcaattatcttttcctttccatccaagtgcatggcttccagcattagtattgacgcgtcagcctgcttcgggtcaaatatccccatctgccaaagctccgttaatgtttgattttgggctattctgctgtaagggttattcttttcagcgctcacagatatatcaaactcagccctatgataaccattttccaaatcatcctttgaaaatgttacatactcgccttttccattgctgcggtttattctgtaagaacgcgggtcatcataaaactgtctcatcagctcaatacaaaaataaataatatctctaaacgcgtcatatcctgttaccagcatatctctggcgagtttttcaccggcctgctgaagcgccactattgcggaatatgccgtaactccgccatgcgtatctccctgctgaaaatctctgtttccggcaatttctttcagctcctctattttattctgacggtgctgaataataaagctatgcataggcttagcctgcagttccctgatattttcgtcgcttaccgaaccggcaacgtgaataatatcacggcttaaatcagacaattcatactcattcaaccctccgttatctttaaccataaacctggtttttccggatatcaaagcatttcggctgataagcccgtccagcttatcaatatataactgagggttcttcactatatcaacaaatccaaaccctaccggactatcttcgtcgggatacaaaacgtcgaacacaaaaggatacatgccatggtcataaataccgtcttcccctatatcctcagatgcttccaaaatatttccatcataaaattttaataactccacagtttgtttttctccgtccgtcttcttataatagcagtctacaaccaaacacttgtcccttaaaatattttggtcgggtcctcctaacacatcgtcatatgtaagtatgtccatagagtttccgccggtaaacctatccgccatgtgaggatatttaactttcagctcttcacggtctataagagctgtcagaaatacaaacttgctgtcttgaatatctattattccgggctcccaaaacatatttaaaaggtctatgcgctttatatcaatatcgccgtttttgccggaatcgggattataaaatatgccataacaggaagctccgttttttagcttataccaccaagccctgctgtaagttcttttaaaatcacacaaatccagctgcataggaagaatttttgtcaacttttcagcaacctgagtatcctcttcgcttctttccaaaatatttggttcaggatagttatccatagcgtcggcatgtttatttgcaataacattgaataagtaaggtgttgtcggctccggtatcaccgcatcagggtcggaattataacggctcttataccacctgttgttatcaatgattctgtgatccagttcttgtttattgtccctataaattttaaaatactcctgaacctttccaaaaaattctgattttatttttccgctgtacctatcatttttcataaattttactcctttttatttatatttgttttttaatttcatcaatctctttcaatacgtctcttccgtttatcaatactctatcgcctcgaatccataaatcgccgtcatccataaaagataaaactgtgctgcctcccactgtcccaaaggatgaatatgtcgagtttttttgtataacaaaactgccgtttgagtatttaacgccgtttatagtaacctcccccgaaccgtcgccggaacctaagactatgtaagcggttccgtcatcaccaacagacattcccagtttttgcagccgcttttggtttttatcctgaagtatttttataccctttgtatccatctccgcaaaaactccgccattcttttgcagatatgaaacactgtctgtccctactatagttgaagaaaatatctcagagctgtcaacacgtccgctgaacaccgcgttgccaaaactgtttatataaacagtcggatttccttctgagttattaattacaaaactaaacagacctgtatccgggtcatactcaaccttaaaacgctcctctttattatcgcttattattatagaacttccgctcatactgagatttccgaagtcgctctcaaccgtaactaaattagtgttgagctgacccgtcctgagtttatcagcagttagatttccaatctgagcattttgtattttagcgtttgaagtatcaatattttcagcttttacgcttgccgcttccgacacgtttccggcgtccaaattattgaaaatatagcttagctcatcaataagcgccgtcccccatttttttattgccttaatatcatctcctgcagctcctgtaagctttggaggtataggcgtagttaaattcggcatgtttttctcctttcagattttaattatttatttaaattattgacctatagtcattataataaatattaagtgacaaaaagtgccagggagaataaaatttaaaattgaactgttttttgatagacttttaggcgataataaaatacaatattcaaataaagacacatcataatcaaaaaataaaatagattcggaaacaaatttatttacaaaattatgcaaccaagcattatcattttcttactatatatttgaggcagaaaaataaaaaggagctcttgccatggacgacaaaaaaataatagatttatattttaatagggatgaatccgccatccctgaaacatcatccaagtatgggaggctgataaattctatagcatacaacattttaaaaaatatcaccgactcggaggagtgcgaaaacgatacatattatgcggcgtggaatcagattccgcctcaaataccacgctgcctgcccgcttttcttgggcgtataacaagaaatatagcgctcaacaaatatgactattattcagcggcaatgcgcaaccgtgaatttgaaactgaattatctgaacttgaaaatatattatcaggcggagaaacgccggaggaaaaatatgaagctcgtgaagttgcagaatttatcagtcattttcttaaaacaaaaagtttaaccaaacgagttatatttgtaaagcggtattggtattcagactcaatttcaaaaatagcgaaagattacaaattctcagaaagcaaagtaaagtctatcttaatgagacttagaaacgaattaaaaatttacctggaaaggcagggaattagattatgaataaaaaggagctatacaaaacaattggattaatagatgatgatttgataacagaggctgaaaattctgttaaattagtaaaacatttaaaaatatcaaaaatagccgctgttgcagcggcggcggttatgcttttaagtctctcggtatgggcggcaaatgtgttaatcacttcaagaggcgctcaatcttcaaatataccatcatataacagcgttccaacagcagaaacacttcaagatgatattggtatctcttcaaaaattctaaataacttttcaaacggatatacctttgacagcggttatattgttgagaacgaggattacagcgaagacggaaggatttttgaaagctataaatcactaaattgccattacaaacgtaatgaagacatgatttctcttgatatagacaaatcaactgcgggaaatcaaagtaaccattctgacacagcagaaacatataaaggaagcgatataaaatattttgcatatacaaacaaattggttcccggagactatcaattaactgagcaggataaaaaggatgaaaaatcaggcaaatatatatttagctatggaagcgccgaaataaaaatatctgacgtacaaatcctatcatttgaatataatggcttaaactacagcatttgcgccgctgattctgaactcactaaagacgaactcataaatatggcaaaagaaataatagacgcacaggagtgaaaataatatgaaactgacaaaaacttttataatactgctatgtttttcaatatttataggattaagtcctgcctacgcattagatgatgaaacaggatttgaactgctggacacaaaagatatttccgacttaaacggaaaagcctattactataagcatacagaaacaggggctgaagtcgtgtttcttgaaaacgactccgaaaaactggaattttctattggctttaagacgccgccgattgataataaaggcgcaaatcatgttttggaacacagtttgctctgcggcagtgaaaaatatccgaccaagaatataatgaattatctaaacagcaactctctcgcagaaatgataaacgctttcaccgttgacgactgcacttattattcgataaaaactgcaaataaaacggaatattataatcttattgatgtttacatgaatgggatttttcatcctatgctgctgcaagatgaaaacattttcaaacagcagggaataaggcttgaatatattgacggaaaagtacaatataacggggttgtatacaatgagcttaaaataaagaacttagaaagcaccgaaaactcaataaactttttatccgataaattatatactgaaatttatggaaacacacccccgtcattcaacagcggcggtacggctgaaggtataaaaactttaagttatgacgacttaatgcgggtttatcacaactattatattccgtcaaacagtatgacttatatttccggcaagcaggatataaaatctaccctgaaactcttagacagtttttttgatggattttcaaataaaaaacctgatatagcctttaatgacacaaaacaactgcctgaaaatcagataagcgaatataatatcacctccgatacccaaaccgttgatattggatttatgtcttccggcgtaatgatgtctgaaggtaatgaggaactatatgcaagagaaataatttttaacctgatactgcaaaaaatgaatgaagtaaacaataagacttttgtcaccggcggcaacagcggcggtatatcaaattcagctctgctggttactgaaatacctataaacgaaaaagataatataatcaacacttataatgcaatattaaaacaattttctgaaaagggatttgactgcagcgaactgaacagcgcagttgacgaatacatatcaaaccgaaaagacccctatatttatgcgccggacctcacattatttgacggaattatatataaaaatgacccgttctattatacagacatatcagagacagaaaaatatttaaaagagaatcctgagttctttagagtaattttagataaatatttcattcaaaatccgtacagcaagatagttatatccggaaatggaaacaaatcgcctgaatatgacgatacgctgtcactaagttctgaggaaatagaaaagataaaaaatgatacggaaaacttcaataattgggtggatgaacccgactcgcctgaggttatcgccggcatcccttctcttacgcttgatgaagttaaaaatgctcctgaatactatgaacccaaatatgaaaacgttgaaaatattccgttttattatactgaaaaactatcaaccgattcctcaacagccagtctgttattccctattcaagatgcagatttaaattacatccagctgctaaactcacttttgacaaggcaagctcaaaagttaaatatttcaaatgtatattttgatatactatcgatggaaagttataatgatgaaaataaatttgacccacagctaataatttccatgtcttcgccagacaatgaaattactgagctgcttgaaaaagttatagaatttataaataacgactctatttgtaatcaaaacgattttgaagagtatctcaaaacagctcccgatgagattttaaaaaatggataccgcgaccctttttatctttcatatgaattaatgcactcctcacaatccgcagaaaaaagactatattcatcaacccgcggcagtatcggtcaaggttcagtgacgtattatcactttttgaaaggtaccgatttacataatgctccgcaaatattgacaaggcttaaagatatggtacaaaatataatattaaacaccgctccaacagttgaatatgtcggcggaaacggatacgatgattttaagactgctgtctgtgaatattttaaagattcaaaacaagctgaaaactctcatataaatctgccggttggctgctattccgcggctgcgataactaatattgaagattcaaaccattttatgcaggcaggttatttcagcaaaaatctttacaccggtaaaatgaacgttctcgcaaaagttctcacatcaaaatacattctgccaacaatgcgcggtaaatacggtgcgtacggagccggcgtttcctttgatgactccggtatggtatgttcagtagccggtcttacggatattgatttggcaataaagatatgggatggaatggacgattatctaaaatctctggacatgacgcaaaaagagcttgacgcgataatcgttcctgtagtaaaagaatatgatgaatactataataattctgaatatggagcgactatggcgctgaccggcaaaacaaacggcgacattaaaaaagtccgggatgaaatgctttcaacaactgtggaagacttgaaacaatttgccggactgatagacgagcttacagcccaaaaaagaatctttgctgttttgagcaaaaaagcggcggataacgccgagtttaaatttgcttattacgcaaatgcaaacactcttgaaattacaccaagactaaaagagaaccccggcaaatacattaaaggtgacactgacaatacgcttccgcaagatagatatttaacaagagccgaaacggctgaaattatttcacgtctgcttgtcgatgaacgcaagcctgtaaatcaaaataaatttaaagatattaaaacagacgactggttttatgattcagtaatttcagtttacgaaaaacaaattatgaaaggttatgatgataagacatttcttcctgacaacaatataacccgagccgagtttgccgctgttttttcaaaatttatatatgaattaacagataagtctgaagtaaattataatgatttggactttaatgactggttttacacaccggtatcaaaaatgacaaactgcggatacatgaatggatacgaagacggaacatttagacctaacgcctatataacaagagatgaagcggtgaccgttatagaccgaatgatgaactcaaaataagatacacgctaacaaacagcgttatttattaacacaaatttttgtacagacaaattcacctttatattccgctttcataagaaggcggagataaaattcacctaacgcggcggactgtgtccggcctgccgatgttcatttagccgctgacactatcatcacatatttctattttcactatatttaaaacatattattgtcaacaaagcaaaatcaataaaaattaaacagaaaaaagagtttatgtaataaaaagtcttagaagaatataaaaaatatggttttgcaagcatcggaagggcgtgcgaagtacgccgcgtaaggcgcgcagccgcggaatacagataaacaaatattctaaagcgcattgaatgtaaaaataaaacactttattaaaattaataggagatggaaaacccatctcctattaatttatcaccaaatatattcagcctctttatctattatccccaaggcgcagcgccgaatcaaatccagcgcatatagagcggcacgctcgcgcaccatccctctttcacctgtgagattaaatttatacgccttatgaaaatcttcagtacacacagaaatataaaccagccccactggtttctcatcggtgccgccttccggtcctgctattccggttattgaaacagcaatatccgctcctgatttttctagcgcgccttttgacatttccaaagccgtttcctctgatacagcgcccgcgcttttaagtgtttcggcgctcactcccaaaagctctgtcttctgctcatttgaatatgttacataaccgcagtcaaaacattcagaagctcccggaacacttgttatcttttccgcaaccataccaccagtgcagctctccgcacacgtaactttaagcttcttatcacgcagcagctgaaccacaacattctccatagaattatctatacctctgccgtaaaccttgtctccgagtatagatataattttctcctccattggctttaacatttcttttgcttcttgaacagtatcagcctttgcggtaatacgcagttccacctgccctgttttggtgtacggcgcaacagttggatttttagaattgttcatcaaatccccgagcatctcatcaaccgcagattcgccatacccaaataccagcaaagatttagaacgtatcacaccgtcagaatatttctcaagatatggtataacgctattgtcaaacatgggtttcatctcgctgggcggtcccggcagcattataaaaatgcagtcttctccctcaactatcgcacctggagctgtgccgttctcattttttaaaataatacatccctcaggcatctccgcctgcttgaaattattttcaggcatataggaattgcctttttgaaaacgatttattatccgctccttgctttcctcatccataacacatttcaaaccgcagtattccgctatggtttctttcgtgaggtcgtcaactgtagggccaagacctccggtagtaatcaccgcgtctgctcttccggcagctatctcaagcgccgatttcagcctgtccggattatctccaaccaccgtagtatagtatacattaaaacccaattcactcagtcttctgctaagatattgggcgttagtgtttactattgaccccagcagcaattctgttcccactgacaataactcaaatgtcatctaaactcctctttccataagttattctaaaccaatataattggattaattaatatacaaaatttcagcgccctcaatagcctcatttatcataaattcaatatcgctgagatttttctcagcctctgctatctcatcaagttttggtttcgtcttaggatgttttggtacaaatatagtacaacaatcctcatacggctggattgaagtctcataagcgtctatctgctttgaaattttcactatttcctctttatccataccgatacacggcctgaataccggcagatttacagctgaatttgtgcagtaaagagcttccatagtctgacttgcaacctgccctatactctctcccgttataagcgcttgcgcaccgtttgacaaagcaatcttttcagctattctcatcattattcttctcatgataaccgtaagataatttttcgggcacttttcgattatatccagctgaatatccgtaaacggcacaacatacagctttataccccttgaatactgggcaactattttcgctaaatcaaccaccttatcttttgcacgctcgcttgtataaggcggactgtggaagtacaccgcgtctaaagttactccacgctttgcaatcatatacccggctaccgggctgtcaattcctccgctgagcaacaaggcagctctcccgctgctgccgaccggcataccgcctgcgccgctgaatttttccgcaaaaacatatgcgtcaccgcggatttccacttgaacagtgatgtccggattatgcacgtcaactttcaagtctttaacattctttaatatttcccctccgacttccctgctgatttgaggcgaattcaaaggaaacttcttgtcttcgcgttttgattctactttaaacgtctttccggcgcagtcaatagatttcatacattccacagcagtcttgtttatgctgtccatatttttttcacagcgaactgccggacagatattgactacgccgaaaaccttttgcagacgctttatggtttccatcatatctataccgtcttcaagcggctcaacataaatagtagactgcgcccttttaatactgaatttaccaatcggagccgttgcagacgcgatgttgtcaataagcttctgctcaaataagggacggttaagaccttttagagcaatctctccgtactttaataaaattaaatctatcttctgcatttttatctccattctatatttttatcttaaagtagaaaaatatttattaatataaaattattattttaaatttagctttcttaatctcggaattatcttttttagtgcctcaatagtaatatcaacatcttcttcagttgaaaattctgaaagactaaaacgaatacttccatctatcatctttcttggaacgccgatttcagttaacacatagcttggttcttttttatgactgctgcacgcgcttccgctggatacaaatatatcctgcatctcaagagaatgaagcacaacctcggcctttgttcccccaaatgatacattcaatatatgaggcgcattattatcaggcgtatttattctaacgttatctatagaatttaaaattccgttttttaatctttctttaagtgcagacatcctctcgattttcttaccaaggtcagttgcagcaattttagctgcaataccaaagcctaccatgccgggtacgttttcagttcccgaacgcataccctgctgctgacctccgccgtatattataggttttatttttgttccgcggcggatataaagcgcgcccattcccttaggaccgtgaactttatgtgcgcttaatgaaaccaaatcaacgcctaacgcgtctacgttaatcggaactttcccaaatccttgaactgcgtcagtatgaaatacagctctcgggtttacagatttcaaaatctttgccatttcagctataggctcaatagtacctatctcattattgacaatcatagctgtcaccaaaaaagtatcaggccgaataagcctttcaaaatcctttaaaatcacctttccacttgaatcaacaggagtataatctatcttataccccctctctctcaattcgcctaaagtgttaataatagccggatgttccaaaggcgtagagattatgtgtcttccgcggtttgcagaggccgttccgaacaatgcgatattatcagattcagttcctcccgatgtgaataaaatttcagatgggtttgcttttatacctgcggcaactctttcttttgctgtttttacggcacgctctgcctctatgcccagcttatgcaaggatgacggattgccgtagttattgctcatagtatcaaagacagccgaagccacctcgtcatatggtctggtggtggcactgttgtcaaaatatatttccatacaaattcctccaaaaatgataaacctttaaactcagaattaattctgaatataaatttaccattgcaaactattctaacataacaaacagaagttttcaaccgccattttaaaaatcttctacattacaatatatttcgacaacattcgatttgtgaataaatatacaaaattaatagattaaaataaaaagcccccgaaatataaaacgtcgggggtataagtattattataaaatattacataagtccgggaatatttattcctccggtcaggctgttcatttgcgtctcgctgtccttatcagcctttctcatagcctcgttcacagccgcaactatcaaatcctgcagcatctctatatcatcagggtctacagcttcctccttgagaataatctcctgaagttctttctttccgttaactgttgcagaaacggctccgccgccgacctcagcagaaaaagtttttgtttccatctcttcctgcatctttgccatctgctcctgcatcttctgagcctgctttatcatctggttcatattgcccattccgccgcccattcctcttggaaatccttttgccatcgttattgttctcctttcacctttattatatctccaaactgctctttcttgttcactatatccattatcgaagcctgactcccggtttgctccttctttgaatgttcacctttcataaacactctggcgcgcaaatttgttcctgctaccttcgaaaacaactcagaaagataatctataccgttagccgttgcaactgaatcatatgctgatttcagccctacttcaatatcgaccgtatcaccgttcaatgtgacttccgccttatacagatacatatacaatctcttgctgctttgctttatcgcttccaacgcctcaggccacatatcccaggccatattattaatttcagtcgaagtagcaggtttgggttcttcctttttttgtgatgaatctatatctttattttcagactgagcgttccatggcggtgcgtcaggatttttatcatgatgtactgcttcagatttaatttcaggtagctgaactgccgcagctcctcttccaaccaattgctcaagcttttcaatccgcgcattaagcgcatcaacctcagaactatatttaggtttacaaaattttatcaaagcaacttctgccgcaatcctaggaatagccatagattttgccctgccgtgatattcattaagaacagttattccataaatcaactgcgttgcagtaagtctttcagcctgagatttgtatttttcaatcgcctccggtgacttttcaagcaccctttccggtttttcacactcattacagagcagtacagaacgaagatgttctatataatcctcaaagaatgtcagaacatccttacccatattcaaaagtccgtccagtttcgcaatagctccgctgacattatttgaaataacatcctcagttatattaaacaaaactctctcgtcaactattcctactatttcagaaacattttcacgccgcagctcttcaccaaaagcagaacatctgtctaaaacgcttagcgcgtctctcattgaaccgtcgccgatttccgcaataagttcaagcgcgtcttccgtagcatttatcccctcggcagccgctactttttttaatctcccggcaatatcatcaacgccgattcttttaaaatcgtatctctgacacctggataaaattgtctgcggtattttctgaggttcagtcgttgctaaaataaacagtgcgtgttcaggaggctcctcaagagttttaagaagagcattaaacgcctgtatcgtaagcatatggacctcatctattatatataccttatacttacatccggccggcgtataaatcacctcttcacgcaggttacgtatagcgtcaacaccgttattgctggcagcgtccatctcataaacgtccataattctgccgtcgataatacccttgcaagtatcacacacattacagggttctccgtctttaggattttcacagtttacagctctggagaatattttcgctgttgttgtttttcccgtgcctctagtgccgcaaaacaagtaggcatgcccaattttttcagaagcaagctcatgtttcagcgtttccgtaatatgattctgtcctacgacgtcgtcaaacgtcataggtctccattttctatataaagcctggtatttttcggacacctgtccttcacctcttttaaaaagcacagataaataaaaaagccatgtgcttgcattcgaaatagctttacaagcgttactcccacagttagctcaagtttggcacccttacggcacatcagaatgactgcttatcgctgctgcgttcccgccctgacgaggttcacaggttccaattgcgtaagaccaaaccgtcaacaccacttatgcgaggcagaccaaacaaagatatccctcatggcaagttttcatcccctctacagcggattgagggttacaaggcaccgctaaagccccgatttaacatgacttaaatattttaacataatttatgttttaggtcaatagtttttacttatttattttctacattttgctttgcaaaatatatgttatttataacatcctttctaaacaactgattattttatctattatacagcaatatcatctttatatataaaatgctaagttaatagttgattttataattacaaaagaatataataaaaatatataattccccctttttaagacgtttttcgtcagcaaagtcctccgtttctaattaaacggaggacttttgttaaatattataaatttatataattatttttatcttataatttattaaataaataatacacatttacggcttttcctcatagaatacattgagcggcgaaaatagtcgtcttgtgacgaaaagttttctgctgctcataataaaaggagaaccagattattttgagctacagcggagatgtattgacctattcaacatcaagtgtttgtatgttggttattgttaagtctttgtgttgaaacagcgtcgcctaaatccgattataccgccgatgtcagatttaggtatattcaatttgtattagaccaatattttttgaaagcagcaaatttatcccaataacctcaaaaataaatttttatctttaaaaatcccagaaattaaagaaaagattttttggtcaagtaatatttaattgaatcattatacgctgctgatacctttgcaaagctgtttatgtgcagccatatatttataacgttaaaacaaatttatgtatggcaatatcatagataagctttaataacaaaaagtctgcctcagcaatcactaatttattgaattaataaacagttctgtgttttacaagttatgcaaatttctgcagacggtttacaacagtctttgggcgtagtctgatttataagcaatctgtaaatcaccatgcagcagcagtcagaaactgtaaccgcaaaacttccgcttaagctttaaataacaattaatgttcaagaaaacacaacaccttgaaacaccagtattcggagaaaatttgatctgtatttttgactgcgtcaatatttaacccgtttattgttgacaaacagatcaaaatgatatattatttaagataagtgcaaaggcgctcacctaaatcggtgagtgcttttgttttttaatcactcgcagacttatttcctaagccttgataagaccaaaagtatataattaacatactttttcatttacataaacaattccaatgtatctgcaagcggaatattttaatataaataatgcagagaccgctatagtctctgcattatagttatccaaaaatcttatgctttaatttaaacatctctctgataaggcgtctttgtgaataggtgcgaagtgccatagaaaacgattccaaagtagtatttctatacacgccgcctcttgatatttcataatgattatcttttgaatattcatttgtgtctatcgcatatgcgtatgtaaaatacctttgaacttcattcaggaccttatcgttaaagtaacctcccggatacgaaatagttgtgacatttttaccggttatcttagctaaagccgcgcacgactctctgaattcctgatccatatgacttttatcttcattggataaatccacatgatgagccgtatggctctgtatgcttacaagaccgctgccaaccatttctttcagctgtccttccgaaaggtatcctttagttccgacatatgaggaaacaacaaatattgttgctttcatatggtactttttcaaaagcggaaacaattcaatataattatcctcatacccatcgtcaaatgtaagtataacaggcttataagtgctgtaagcctgttcatactcgtcagcaaacaaagtcgtataaccattgtcgctaaggtatttaaactgttcttctatctgagccggacggcaatataaattttcatctccgcccctgggttcatccgccacacaatggtacataaataccggaatcccgggttcagtccaataaggaaccaaaaatgcagctaaaacagctataataactattataataatggtgtttcttcgtcttctgtttattcttaatctaactctgttcataacaaccattcacccaaatatgtttatagtctgctcttcccgccgcttttgcaaaactccagtttttatcctttaacaacaatatttatcagctttttaggaacagcgatacacttcactatttcttttccgtctataagctcctgtattttttcgctttccaaagctagctctttcatttcatcagggctcatatcaggattgattttcagtttatctcttatctttccgttaatttgaagaacaatctcaatctcatctacaactaaagcgttatcatcatatttcggccagttttcgcttgttatatctgtttctttgcccataagctcccaaagctccgatgtaatatggggaacaaacggacaaagcaatataactaacgattccaaagcttcagttataaccgacttgttatagtcttccttgttaaccttttccttatatacataaagcgcgtttaccatttccataacagaacttattgctgtattaaaactgaatctctcacaatcagcagtaactttcttaattgtagtgtgaaccgcaagccttaactttttatcgtcgtcatttaaatcagacatatcggaggtatcactgataacataacattttaaatcttcaacagctctccaaactctgttaaggaatctataagccccttcaacagcagtgtcattccagtctaaatccctctcgggaggagccgcgaataatataaacagtctcgctgtatcagctccgtacttctctattatttcttcaggacttactacattgccaagtgattttgacatcttagttccgtcctttaataccattccctgcgtcagtaaattttcaaacggttcttcacagctcaaatatccaaaatcatgaagcgcctttgtaaaaaatcttgaatacagcaagtgaagaatcgcatgttcaactcctcctatatattggtcaacattcatccaataatcagtcttttctttatcaaaaggcatcttatcattatgagggtcacaatatctcaaataataccaggaagagcatacaaacgtatccattgtatccgtctcacgttttgcaggacctccgcatttaggacaggttgtatttacaaactcatcacactcgcttagcggtgactttccctgaccggtaaactccacgttctcaggcaaaatcaccggcagctgttcttcaggcactaacacttcgccgcacttttcacaataaaccacaggaattggagctccccaatatctctgtcttgagatcagccaatctctgagcctaaagtttacttttttctctcctatacccttttcatctatatatttaattatagaagcaagcgcctctttgctgtccataccgttaaactgacctgaattttccattataccctcagccgcaaacgcttcggtcatatcttccgacttcatattttggccttttggctgaataacaatttttataggtaagttatatttcttagcaaaatcaaaatcacgctgatcatgcgccggtactcccattactatacctgttccataatccaaaaacacatagttagccaaatacagaggtattttttcacctgtgaatggatgaatcaaatatgttccggtgaacacgccttctttttctgtatctgtcgccgagcggacaatttcactttgattctgaaccttttttataaactccctgcattccgcttcggtttcacttccttttatcagttcaccaacaaccggatgttcaggagcaataaccatataactaacgccaaaaattgtatcgggtctcgtggtgtatacagtgagttccttatccattccgtctatcttaaatcttatctccgctccttcgcttctgccgatccagttagtctgcatggatttaaccttatcaggccatccgccgagcttatcaatatcatccaaaagcctctgagcataatctgttattttaaagaaccactgttccaaatcctttttcccaacttcacttttacagcgttcacacttgccgttaacaacctgctcattagccagcactgttttgcatgaaggacaccagtttacatatgatttctttttgtatgccaaattatgcttatataactgttcaaacatccattgagtaaatttgtaataatcaggcttagccgtagcaacctcgcggtcccaatcataactgaatcccagccgtttcagctgtccgcgcatattatcgatattcgaccaagtccactcagcgggatcaagtccgtttttgattgcggcattttcagcaggcagcccaaaagaatcccagcccatcggatgcagaacattatacccctgcatcttcttataccttgccacaacatctcctattgaataatttctgacatggcccatatgaaggttgcctgacggatatggaaacatctcaagcgcataatattttggctttccgttatcatcctcatttattttaaatgctccgttgtcttcccactttttctgccatttttcttcaatattcttaaaatcgtacctcaatcctattcattccttcctgattactgttattaacgtttaaatatttctgtttttacaccagcagatctgaaacgtcgacccttattccatctttccaaacacgttccaatccgtaaaattctcttgtctccccaagaaaaatatgaactacaacttcatcatacgccaaaagaatccactgtgccgtcttatatccttctttattaacaggtgtaagaccttccttttcaagctcctcttcaacattgtcgcacaaagcctttacctgggtatcagaacctccggtaacaattataaaataatctgtcattgttgtaagttcagatatatttaatacttcaatatctcttccttttttaccgtcaagtatttttacaattttattcactgtctcattagtacttgccatattttttatcctttcttaatacaaacttaaatttattatctaaaattttcacttatcattgctttagcttctctttcgctcacaacaaaatatgagatgttacttatatatttagaatctccgggaagctgatatatattaacattattctttccaatagtaaacatatcaaacataagttccctaacctcggcattgtttaagtctgtagtggtgtttttcataacagcactgtataaaaacggtgcttttaatattccaatcgggctcaaagcttttttcatgaccgcagaataaaactctttctgcgctttatttctatcaagatctcccataggatatcctgttccgtcgtcattctttctgaatctcataaacatcatagcatgctcgccgtctagcttttgttttcctgctttaagctcgatgctaagcccctgaatcgggtcatgataattcatgtctataggaacttctacagtaacgccgcccaaagcgtcaacaatctctttaaaggcgtcaaaagtaatggttgcaaagaagtccgcatgcagtccggtaacgctttcaacttcttttttcaaagtctctatccccgaaaagtaagcggaatttatctttttatcatttctcttattattaactttagtatcacgcggtatttgcagaacactcacttttttatcaatattattcacttgaacaaataaaatgaggtccgttctgtaaccgtccacatcgacgcccgccacaataatgtttgtaacctctgtaagtcttgactcagcgttatcgccaaagaacattttaccgaaattaaaacccacaaacgcaaatacaatcaccaacacaacagccatcatgcggcgaaacggtgattttcttctcataataccgacttctcctttgtctatacacgcactcttatctctggctgcgcttgattattaaatcgtttcttgcatgaacagtgtcaggatgaattataagacctcttttgattaaatctaaaatagtttcatctataccggctattatggcctcgtctatattttcataagctaagcgccgcagtttttcgacaccttcaaagtctctgtttggctctatgtaatcagctatataaattatcttggcaagggtgctcatatttcccttgccagttgtatgatacttaatagcgtctaaaatttccggatcataaatttcaaactttctctgcgcctcgcatgctcccaatggtccatgcagaattttgggcataagacgcgacatagaatcaaccggcacaccgtattcagttttaagaattccctccatctcttccggcggaaactctttggcacaatcatgaaccagtcctgccaaatacgcctttgattggtcagcgccatatctccgagccaatttttcagcttcttccgccacacccaaagaatggacataacgtctctcactgaggattttttttaattcactttttatcccgtcgatttctaacaaaccggcacacctccgtagaattaattcttacacgcttgataaagccctttatttaaaatatattctataatactgtcatccgtaaaatatctgatagatttcccttctttcactctttcccggagcatacttgaagatacatctataaacggcacatctattcttataatatcagctgaatacatgtttctcaaaatattaatcttttcattcatgttttcgtcagtaaatcctgtccggccggcaacagctaccgtacactgttcaaaaatcttctcaggcttataccacttttcgatataatcaagagaatcagcacctataataaaatatatctcatactcattattcggataaatttttcgaagttttgcgagagtattagccgtatatgtcgtctcgtcctgcgttatctctatatcagacaaatcaaacatcggattttttgaaacaaccttatccagcatattatatctgtcccagcctccggccgatttatcagtatttttataaactattctgccggtaggtataaacaatactctgcataaatccagctgttcggccgcctgttctgcaataacaaaatgacccaaatggggcggattgaatgttccgcccattattccgatttttttcataataatttaatataataccaccttggtaacatccttgtcaatagactttgacttcttaccgtcttctctggtaaagaacaactcaaagtttgaaccgttgtcttgtttattataatacactatctcaccattatttttgaggccatatgaacttacgcctttaacaacctcaacagtttttcctttattgtcaacacaataaacgtctcctgttctggtttctaaactgtaatttttagcatatacaatatatgaacctgttttatcaaaagaaaatgctcctgcgccaacctcctgcgccaaaaccttcgattgttcgcctgtatatgcgttcagtgttaccaaattccattttatatcataattatcagcatatctgattgtctgtccgtcaggtgttatattgcatgaataagcagtgtcgctgatttttttatctgaaccaaccactccgttcgttattgaaacaacaaacaatgctccgctctcattagcaagatcatatccctgaataaacgcggccttagtaaagtcgtcatttatttcaaactgtgataccttcttatggtcctcatcatcaagcacagtcacattttcagctatcagctgaccttctgtcccggcttggtttgcataaaaataatcaaaagccgttccctcagcgtttgcctttctgaaaactacagcctgttcatccttgctcatctttattatctctgtaagcccgccggcaattttttctttctcgccattttcaagactcgcataatataagctctgataatactcttcatacgttccacctatatacataccctctgaatttttcaggaaaacaggttctattctggaaccgtctgtgaccataacaggttcacctaagttatcatttttaagatatatttcaaaacactcgttttcagtgttatagtttttagcatataccactgactttcctgttggatttgttccaaataccttgtatacatcagactctatttttttagcctcagcaacctcgccttttgttatttccgcaaggtataaatcgcctacaaaatactcgccgttatattctgttatatataaggcactgtttccgttctgtccaaatcggaaatttccaatattcacattatcagaaagctttacagcctttttagagatattagaccaaaaattaagagttcctccggcaccaaattcatcagtatccgtcaaatataaaactccgcttccgtcttcagcaatctcaatatcataatatacattatctgcaatcttaactgtagaattttttttgctattttgagtatactgcaatgaacctgtattattgtttaaatcagcattatccaggaaataagacaaagttccgtcagcagtataatttataagctctttttcttttatgggttcaaactttggtgccggcgtgggagtttcttcctcgtcatcatctctgtttctatttggagttgctgttggttcagtttgttccgtatattcgctggcgatgaaattctgactgacctctactgatttgccgccataataggaataaagagagttatccttagcatacaccgttggtgttgccggaatacccgcagtaactttagacgccatatttacagaagctataacaaccgatataacaagaaccgcaacaataacgccggctatcaaaccggttttaggcgataccttaaagttttttgaacgcttgccgctccttttcgggcgcttttctgctgcatcagacttatcggcagatccgcttacagttgaaatatcagaagaactctgtactctttcaatctttctctctgcggcaccggcagctttatggcttctttgaccgaatggagcagaagaatcagaacgctcaccggtttcaactgtctctttaacagtcttattttctttatcctgaccggagaatgaggaaaaaataccgccgcttctttttgcctgctttttttcgcgtctttcttttcttgccaatcttgccgcttctaacgccttgattttctcgtcgtctgtcatattagcaaaactgtcgtcatatcttgcttcccttttctttttcaaagattcatcaatttcataatcagcgtctccaacatttgactgattactttcaaacatcagagaatactgtctgtcaaactcattatcctctgtaccggaaggagcttgtcctgaagtattaatcttgcctgacgaagttaacttctgattggaattggaatttgtatttttctttccggcagacgcactcttatttttatcagttgtgttaacacttttattctgcggaacggtgttttggggggcagcggcattgcacttgggacaggttttcgctcccgccggaatgtcagcgccacacttttcacacttcattgataactcaaccacctttctgggtcatttatatactgttttcaaacatacttattacaattataattaaatataattttaccacattataagacaaaaaacaactgttttataaaaattttatcattattacaaaaaatggctttcagttttaacagtacagaaaaaaacacctcatttaagtattcctcaaataaggcgtttaaattattaaaattgctatttattttctaattttaatttttttatgaattcttgttcttcttctgtcaaacgagctttgttaagcatgctcttgcgctttttaaaagtattttctatagacatctttcttttccaattctcaatatttttgtgatgcccgcttagtaatatatcaggaaccttctcattatgccaaacttcaggtcttgtatactgcggatactccagcaatccgctatagtgagattcgtccgaaaaagcctcctcagattttaaaactccgggtatcagacgtgcaacggcgtctaccacggccatcgccgcaatttctcccccggtcagaacaaaatccccaatagaaatttcttcatctattatctcatcaataagtctctggtccaccccttcataatgtccgcaaagtataacaacatggtcatacttttttgccatacgttttgctgtggattgtctgaaagttcttccctgcggagacatataaacagtataaggtttataatttaaatcttcagtcacgctttcatacgccttaaaaataggctcagcctgcattaccatgccctgtccgccgccataaggataatcgtccacgctcctgtgtttattaaatgcaaaatcccttatctgtatataatttaattcaagcaaacctttttccttagcccggcctattatacttttatccaatacggcttcaaacatttccggaaaaagcgttaatatatcaaacttcataactgaaaaatccccgcttccttttcaaaacttatacaagaaataaattcctagtcatcaatcaaacctttaggcagcttgactactatatatcctccgtctatatttgtctcaagaaccactccttcaataaccggaataagcaccggctttttgttgaatgtatcttttaaggaatacacatcattacttcctgtcttaattatttcgtcgacaacgcccaaaattctgccgttctgttcctttacagtgagcccttcaatatcggcaatatagtatctcccctcaggcagttccaaagcatctctgtttatatatactattttatttttaaatctttcagcatcatcaatgctgttcacattttccagctgaacgatttggcatgttttatgaaaacggttacgcacaatattatatttttccccttctataaataaatactccagctcgtcaaataactcgggttcatcacaccaaggctgtatttttacctctcccctaataccatgcgtattaacaatttttcctatctccagcaaatcatctttcatcattttactcctctgtaatatcgcttgatttttcaattttaactgtattcacatttccatcccacagacatttatctaaatccactcttccatcatctgtaaatattactccgtcaagttccagcatcattctctgatgatcctcgcctccaaaggcaaatgccttagacgtgcatccgtttctgttcaccactctgaaacacggtatttcgtcaggttcaggattgacatgcagagcataacccacaactcttgcaagacggggatttcctgccaaagacgctatctgtccgtaagttgcaaccttgccgccgggaatttgttttactatctcatatattctttcgaatgtgttcatatttgccacctcttgtcagacgcaaaatatccaatacgttaaaaggctatctcaaaacgagataacctttagactataaaatgtccacaacaacttttttattctcgcggctgcccgcactctttataacagttcttatagccttagcaattcttccctgctttcctataaccttacccatatcgctttcagcgacatggagcttcagaactgtaaggttttctttctcgacaacctcaacctgaacagactcagggtcagtaaccattgacttagctataaattccaacagttctttcattttttcatcctcccgcaagggaaactatttaaaattagtcgataatacccttgttctttaaaagtctcttaactgtatcagttggctgagcgccgtttccaatccacttctgtaccttttctgcgtcaaactcaacagcggccggctctaccataggattatatgttcctacctgctcaataaaccttccgtctctaggaaatcttgagtctgctacaactacacggtaaaaaggtgccttctttgctcccattctctttaaacgaatctttactgccattttttaaatcctccaaattaattcttaatgtatataaattttattatttttctattgatttatactgctgtaaagctctgaagcttaaaacggaaatccgcctttaccgcccattcccgggccgcccatcattccgccgagcccttttcttttaaactttttattcatattgccgccggaaagctgtttaaccattttctgcatctgctcaaattgtttaagcaatgcgtttacctcaactatagaagtaccgcttccttttgcaattctctcttttctcgacggagtaagcttatctttaagctctctctcctcagtcgtcatagatgttataattgcctctatatgagccatttttttctcatcaacacttgcgtttttaagagcttttgcattcaccccgggaatcatacccaaaacgttttgaataggacccatacttttcatttgttccatttggtcaagaaaatccgagaaagtaaacttttgggtcatcagcttcttttcgagttcttcggctttctttaaatctaaagcctgttcagccttttcaataaggctgagcatatctcccatgcccaaaattcttgaagccattctatccggataaaactgttcaaggtctgtgagtttctctcccataccgcaaaacttgataggtttctgagttacagctcttacagataatgctgcaccgcccctggtatcaccgtcaagcttagtcaaaacaacgcctgaaatttcaagctcactgttaaacttatcagcaacgtttaccgcgtcctgtccggtcatagcgtcaactaccaatagaatttcagtagggcttacttctctgacaatctctttcaattcatccataagctgttcgtctatatgaagacgtccggcagtatcaataatgaatacgtcgttagaatgctgaaccgcatgttcaagaccgcgcttagctatgccaacagcgtcggtaacgccctcttcagcataaaccggaagttccagctgaccgcccacaacctggagctgctttactgccgccgggcgataaacgtcacacgcacacagcaaaggccgctttccctgcttcttcagcagtccgccgagtttcgccgcagtagtagtctttccggccccctgcagacctgccatcatgataattgtgggaggttttgaagcagtattcagcttctcagcttcaccgcccattaattttatcaattcttcatttactatttttattacctgctgagccggagttaatgattccattacttccgctccgccggcacgctcagaaacatccctgacaaagtcttttacaaccttaaagtttacgtcagcctcaagaagcgccagcttaacttcacgcattgctgcctttaaatctttctcagatacttttccttttcctctgagcttcttaaatgtgttctgaagtttttcagataaactttcaaatgccatatatacacctcaataaattctctaaaaccaccgaattcacaaaaactattccgtctcaatattatttatatcatgtattataatcaatatatcattaatcttatgttttatatcatctgacagagatttcacattaggagaagcttcaatatcacggattatatcatcaattttcaacaaatcagattttattttaagaaatctagatgcaagcccaagtctatcctcagtatcaaacaaggtgttctccgcccgtttaatattatctctgacgccctggcgggttatccccatatgttcgcttatttcagccagcgataaatcctcgttataatataaatctatgctctcagcctgtcttgaagtgagcatatttctataaaagtcaaacaataatgcgactttaacatttttctccataatacctcagtccgctctcagtctataaaacctcttgtaaagcaaattaactttacaactctgatattttaacttattttaccccgcttgtcaagagtatttttaaaatttgtaaaatataactaattataatagtattaaacaaaaggggatgcaaaacacaaaattatgacagcaaatcacaaaatattctattatcgtgaaaaaacggcgctctcttcagacttttagccataaaaagagtaccgttttttgtgaagtatttttgaaagaggtgtttacttgcaaacccttttcaaacttgaaattattttacattaaccgaatcaataactgtttcaaaaatctttatattctttgctccataatactctatcggagtatcaagcatacattgaacgcaattattaccgtcattgcaaataaaaatatccattatataagccaaaccttgattatcttcataagagaaaaccgcacggtatcctttcttgcttcctacagcagtataagaggccggctttattaacttatagtttttactcttttttgaataatctttaagcattgaattcaaagcatcctcaatacgatagtttccatcaattgcaaaaacaataacagacgtatctacgccattatttaccattgaagagttgctcccagcatcacggtttatattccatgtcatcggtgcggagtattctacgttagctgacccatttactgttgtatatgtaatatcatcctcttgtttaaccaacaaacttccaactttagacttgtcaatatctttaacagtaacagacttctttatcgcctctatatcagcgtcgccgtttccaacaaccttgaatgcaaaattataagcataatcaccctgaacaaagaaaatgtcttccatagtttcaaccactttgccatcactattcttaacactgtatgtgtaatactttgcatcgtttcctaaaaatgatttagttttcacgctgtcactgaattctgcgtaatccaaattatataattctttatttccctcatagtcatgtctagcccagctatcaatagaagaaatattatctacggattgaatagatactccaacatagctgtatgagttatcactgtaactttctctgtttgtaaaagttataacattttctatatctttatttgatgactcataccagtcggcgggcatatctaatttgaactttaagtttttattctcataagttctcttgccatttacaacgtctgacaaatccacagcgtttttaaaatcctttacgtttatggaaaatgtctcagcaagagaaatagaatccatgtctccaccgtccagactgacttcaactaaaactgtataaagcagtccgtcagatataatatgcttctgatattcttttatagtagatgattttgtttctattataagacaatcattaccttgagaatctttgctttccgactgttttgtaatagttttgttacctgcagtctctttaaataatgtaaacacttcatcttttgttataccgtttaatcttgttataaatattcctatagccgctttatctccataagcaaaaacagtatttcttccatcaaacgcacggtctgctacgcttaaactttttgacgctttcatagaccatccgtaatagctgtctcctatatactctttgtccgtattatgcagtatagaagaataatctgttacagcgccttcctcaactatagttttctccactaaaatagcttctgtagcgtcatcgtatgaaacatcggcgccaaaattttcagtaataaatctaagaggtaccattgtagtatcgtttgtcagctgaggagccaaaagcaatgtagtcttttgaccattaaccaaagcatccgtcctgtctatccatatatttattacaacatcctcatatgtaagtgtaacgcccatatcagcgtcgttccattctacagtggctccaaacgcctcggttataaccctaagcggcacaagcgttgtgccattctgctcatatggtgttgttacagcaacatcctgatcattgatttttaaaatactgtctccaattttaaacgcaattgtaattttcttttcagttacttcattgttatctgaattttcattgcctatctcgtctaaaatatcgcctacaactatattttcattgttatcttcattgtctccggaagccgcaaatgccggcagataaacacaggctgacaccatcatcagcgcaatccccatagccaataattttttaaaaatatttttcatcttataatcctccgcttttaattcttatatttttatttttcatcaaaagttatatatgtatctataaaactatcccctcgctttacctgcacgccggcaccgcttccgggcaaatagttttttgatagttcgttccagtctattttagaatttacataaacgccgtcgacagagattaatatatcgccattctgtattccggcatttgctgcggctccgcccggaactattcccgagaacgtgaggccttcattacttggcagtccatatttcgcagctgcgctctcctggaactcccctccaaagcttggtctttttactttgccgtatgtttgaaattgatttattgcatattttacgtccgatataggtatcgcaaagctgagcccttcaattcctgttccaacatacccggaagaacatatacccaaaacctctccgtttaaattaaccagcggacctccactgttaccgggattaattgcagcgtcggtctgaataagcttataatcgctcgaagtgcttcggtttacaccgctgataatcccggctgaaaccgagttccgcagtgacattgataccggagttccgacagcaactacttgatttcctggataaatcgaactttcatcagcaaactgagctaccgtaagacccaatttttcaatcttaacaacagctaaatcaaggtcactgtcgatatacttaactttcccttcataaccttcgccgtttgacaaaatcacaattattgacgacatatcctcaacaacatgagcgtttgtcagtatttctccccccgacgtaattacaactccggtaccatgagctataccctccgcatatttatcctgataagttgcggtagtgtttccggtatagttccccactatagcaacagtactgggcgaaattttattaatagcatatgaataaatatccgcgcctgactgagactgactaatattaatttcctgtgtttcttcattccaggcaacatctgcgcccaaactttcactaaccgccctcaaaggaacataggtaacgccgtcctgaataaaagcgtcggtttctatttgatttccattaacgaatatatttggtttttctaaagaaaaaacactatatccaatacaacaagatgaaatcagcgctgcagacactgccaaacaaattctttttttcataaattatcctccaaaatttgttctttaaattcacatttatataaatacaacaaaaaaatagcaccattcaaattgaattagtgctattataacatgaaatacatttcatgtcaatattttccatataatttcttttttatttataatttcacacgaatttacactgggttcaacaaccataaaacatatattaatacaatatatatttcacattcataaagagttataaaacttccgctgcaccgcatattcgtaataaaattcaatctttttcttttatataatatcatataaattataaatcccaaaaccgctccgaatgtattggtgattaaatcatctaaatctgtggttctcctattaaataattgaataaattcaattgaaaatgaaaacaaaaaacctattactgcaatccttttccatccgatttttgatttatcaatactcagaacagagaataagaatccaaagggaacaaataaaatgacgttcagaatataactcatttggtcattaaaatacatacgatacggattaatatgtatttcagccggattaaaaagataaataagtttgctggtaataggagacaacctttccattgccgctttgctataattaataatatctaagtccagtgaatatttatgagcaataatatattttatatcaggaacacctgttgttgttaaaatgccgacgcatagaaagcagaaaatctgcaccgtaatgacacggtgcagattataatcattacctaatttatgtgaatttttagctattaaacactgcgccaatacaataaaaggcagcatcatcaaatatatttttacagactccagtatatgcaaattattaaaccccgagatactaagccaatttaaaaaattattcaacatagtcaaattcacatccatatatttcaacagggtctccgtcctggattccggcttcttttagcttgtctattacaccgctttttataagtgcacgctggaaatactgcagggattcataatcttccatattggtagaacctacaataaactgtgcccgtctgccctcaacatgataaactccgtcttccacactgactgtaatcgtatcgtcagcttttctgtctgactccaaatcaaacatttcgtattcttcttcaaactcctcatcaggaattttagaaagaatttcataggtgtatttcagaacttcgcttatccctgctttagtagccgccgatatcttaaagaccgtataccctctgtcctccatctctttcttaaacgcctcataattttcttcaaaccccggtatatcggatttattagctaaaactatctgacgtttttgagccaacttttcactatacagtttaagttcattatttattgtatcaaaatcttcaatcgggtttctgccttcaattcctgaaacatcaacaacgtgcagaagcagctttgttctctcaacatgccttaaaaactcatgaccaagcccaactccttcatgtgcgccctcaataattccgggtatatcagctacaacaaatgaaccgtcacccatattcactacacccaaattaggctgcagagtagtaaaatggtaattagctattttaggtctcgcgtcactgacaatggataggaatgtagattttcccacattaggaaatcccagcagcccaacatcagcgattaattttaattccaaagttaccattctctcatcgccaggcgcgcctggttttgaaaatctcggcacttgtctggtagcggtcgcaaaatgggcgtttccccagcctcctataccaccttttgcaataacaaactcctcgccgtcctgtttcaaatcacatataacaagtcccgttttttcatctctgactatagtttcaacagggacgttaatcctaagatgctcgccgtttttgccattcctgttcgcgtctctgccgtttccgccgttctcagcggcaaattttcttttgtatctgaaatcaaccagcgtattaacgttcttatcagcaacaaaaatgacatttccgccttttcctccgtcgccgccgtccggtccgccggccgccacgtatttctccctatgaaaggtaaccgctccgtttccgccgtcacccgctttaataaatattttcgcactgtctgaaaacatatttttcctcctgttccgctctaaaagcgctggatatagctctaactatatattaagtttaaaacaataatcctatacaattattttaaacttaatatataaaaacaaaggggcggacaaagtccaccccactatagctgtttaaattactgaacaatttcgtaaacagaaacctgtttctttgtcttgcccttacgttcaaacttaactcttccgtcaacgagtgcgaacaaagtatcatcactaccctttttaacgttcactccggggtaaatcttagttcctctctgtctaacgaggatatttccggcaataacaggctgaccatcgccctttttaacgcctaggcgtttggactcggaatctcttccgtttttggtactacccattcccttcttatgagccattcttaatcactccttgctatcaaaaattatgaaaatcaatacttatgcattgattgctgaaatctcaacctttgtatacggttgcctatgtccctgcttcttgtgataatgctttttaggcttgtacttataaacaataattttctttgacttgccgttcttagcaacagtagctgtaacgcttgctccgctaacgtaaggagcgccgactttaacgtcgtcaccgccgacaatcaagaccttatcaaacgtaacagtttctccggcttcaacatcaagcttttcaataaaaactgtatcgccctgttcaaccttatactgctttccgcctgtttctataactgcgtacataatcgtaatacctcctattacccaagactcgccattggggtggcttccgcaacttaataaaaccccttctgcgcggttaccgatataatataccatagcttaaaaattttgtcaagtaaaaatttatataatttatattatccgaaaaatttaagtttttcagatttattttccataacactaaagttataataaatactttttttacaacccaaaataacatagctgtttattattttgtttttatatattttttaatattttaaatcattaaataaaacaaaaaaagtcataagacttaataaataaagttagttaattttatcttcactattaaaatgaaatttacaaaccatgttacatctaatattttaaaaaaatctgatccggtattataataccggatcatagaacagctaataatttttattttttgtcataaatctcctatgcagttttttaattgggaagaaatttattacttttaatttattttctattatttaacttcgtaactgtctgaaagcggtgtaatattatcagcactattccaaatataaagtacaactttattttctgctgtctcctgcaattcatttataacatattttccgctgcctaaaacgtcagccgtcttaataccaattagtattccgtatttattgtattcagcagcgattagacttgcattttccgaactctctgttttattatattttatctcaacttcaagattcccgttaacatattcggcgctgtttatttggtattcaaatggagttgatgttggttccgggctctcagtcggattgccgccagcttctgcaacggaaatgccggccaaatttatatctccgacaggtccggctatatacaatggcgatcccacttctgtaaaatgataggtgaacgaacagtcccctcctgcctcaggtgtaaaagtagctgccggtgtgcttaaatcagtagtatacaaccctaaataattagaaccgtttgaataaaaatacaccgtaaccaaacattcgctctcaggaatacaataaaatgaacgtgaatctacctgtttagtttgatatcctcttgttattgatacatctcctgccgtaaacttatttgtcttataactgtttccggatcccttatagcagccgacataaccatcatttgatatatcaccggcagacatactctgtccgccgaaccaatcctttgcataactggttacgcccgttggtatttttgttatatctcccggaggttttgccgttggcgccgaggttgcatccgggtctttggtgggctcagatgtaggcgttacataaggcggttctactggaacagcgcctcctgcaacagcgacgagttttgacttatatgactttattgcctccaaaagttcaggaattatttcgtggttcgtatcctcagccgcattatcaaaggtccacttaaagtctccgccgtttactctgcccgcatatttttttaccttttcaacagcttcttccgcggtatctacactgtactcatacataatgctggggtcggtatcaaaattattatatgtcccttttcctacttcatcgccttttttggctgttaccgtttccggcacaacctcatcacggctgtttgctatatatgcgtcaaattctccatcgtcaggagtattctgatatgtataaaacctttttgctccaacaattacgtccccgtaggattttatcataccgcccatttgacctgaaagagttcccttatcattatatgttcctgtttcagagttgtaacagtcgctgccctgagacgctattatcataggtctttgacaatttctataataattattttctgaaaataccgatgttttcattgccgcaccgattccataaagtgcattgccatcataataattgttatatacatggttgctgccaactacgcatctcggatgccttgagtctgtatggtcaaaccagttatgatgatatgtagcataaatcttggcttcatcagtatacatattgctgttttcccacggaccgcccgagacacatgtcttgcccaaatcccacatatggttatacgcaacagtcacataatctgaccttgacttaatatctatagctccgtcgcctttaatttggtcagcgtccttgcccggcgcaccgtagaaaaagtcacagttgtgcgcccaaaagtttttgttatcagtatcaagaacaacagccgaacctgtggttccttcaccgccgtacatcattccgaaatttctcatctcaaaattgctgcttctttttagtgtgataatccagccatatattagcgcgtcgtcgccaacgccttccaaagttatatttccggtgttgataaacctcactgtatgattgtcggttaacgccggttcatcaacacggccgataagtcttatgcacaaagttgtctttatcttctttgactccctataagccaaaatattataaagaccaactcccaacgattcatcgccgtttattgtaacggtatctttattcccgtttgtaacatagataacatctgcgtcttctctaagtgtgccgtcatcattatatgcgccgcttgatgttccgtatggagaatttttagaaaaagcaaaaccctcgcgtgcatgtttcattacggacagcgctcctgtttcggctgatgcctcagttatctcagcaccgttttttaccggaaccacttttagaatatattcaccctcaggcagtcccaaagcgtccgccctgaaatatcccggatatgttctaaccaattcatcatccagcttaaaatattcccctccggcttgtttgcagtaaacattgtaaccatcagcacccgaatattcattccaagtcacatatgctgtttcaagccaaccctcactgtgaattaaagacacagtggtttgattcgctgcagctgaaaaacttactgcactcagtaaaaataccagagaaataattaaacacaatcttcttttcaaattagttttcataattgccactccttttaatttttcatttctcttatattcgtattataacagcataaaaatttatcgtaaagtagcagttaatgtttatttttatggtagcagattatttactgcagccaaacattcttttgtaccagggcggacaccagtttggatccggggacggcgccggctgtttgtctatcactactcggtttagctcttctatatagtctacttttgccgaaaatgcttctgataccgctctcagcggtaccatcgttctttctcctattattctgggcgctgcctctaaacttatttcctcctcttctccttttttacttttttccatcaccgcattgtctatctgcattactatttccgtctctccatccgttgctgttactacttctttctcttcgtcccactctacctctgctcccagtgattcaaataccgctcttgccggcaccagcaatctctcgttttcctcaaccggcttctgatccatacttaattcttctccattgctgaacactgctacgccgttctgtcctgctccatccactatgtatgggtcttcctctgttccgctccctgattttattatcagatttgcctcatttaaataaaacgccggccgtactcccaattcattaggatgggtcgcaacacctctatattcaccattaccttttattgatgttactccattataacgtgccaaatcatactgtgccctagctaatgcaggcgttatcagccaataccaacaatattcattattgttttcctcagttaatatagattcgttagttcttctagctctaatctctccaaaattattccaaatgtcataaatttgcagctcatttaataaaaatattgtatctgacactcgatacatagctcctctaaatgcatccttaaactctgaaacctcatttgtatgtactgtttgcggctctctgtcacttccaaacgtatattgaaaaaggtatggtctcgtctctccattttctgcaagctctattctattctccgacagcatttgccactgacttattgtcttcattattgataactcttgaacagaaaagttgttttcgtttaaaaatcctgcttcatctgcatatgggtattttacatcctgatcccatccactaaactgcactccctccgctgaaggtgtatttccgttcggccattctatttctcccgctcccgctttagaattgagccattttcttatggttgattcctcccaaaaatcacttccccatcgtgatgacaaatgtctattatctcccgccgcaaaagttttaaaacatatagctttatcgcttactataagctttccattgtattcatccgccatgtatctccataatattggtgctccgttatagcttcctatctgaaaatatgatcctatttctattccctctgctgaaaccggattaactgttaatataattgcaagtattgccgttaaaattatacttattatctttttcattgctttttctcctctgttgcagccctatttactgcagccaaacattcttttgtaccagggcggacaccagtttgggtccggggacggcgccggctgtttgtctatcactactcggtttagctcttctatatagtctacttttgccgaaaatgcttctgataccgctctcagcggtaccattgttctttctcctattattctgggcgccgcctctaaacttatttcctcctcttctccttttttatttttttccatcaccgcattgtctatctgcattactatttccgtctctccatccgttgctgtcactacttctttctcttcgtcccactctacctctgctcccagtgattcaaataccgctcttgccggcaccagcaatctctcgttttcctcaaccggcttctgatccatacttaattcttctccattgctgtacactgctacaccgttctgtcctgctccatccactatgtatgggtcttcctctgttccgctccctgattttattatcaaatttgcttcatttaaataaaaccctggtcgtattcccagttcatcagggtgggtatatgcgaacacatactcattcttgccgtttattgctgttacagcatcatatcttgataaaccatacccttctctgtctatcgcagaagatatcaaccaatagcaacaataatcattattaatttcttttccaagcatcgaagtgttagctattttagagccagcctctccaaatttattccatatatcatatatttgtgtttcgtttagcaggaacatagtgtcagatacacggtacatagctcctctataggcttcatttaactcctgaatataatttgtatgttcagtatatggttgtctaccactaccaaaagtatatgcagaaagataaggtcttgtttctccattttctgcaagctctattctattttccggcagcatttgccactgacttattgtctttattattgataactcttgaatagaaaagttgttttcatttaaaaatcccgcttcatccgcatatggatattttacatcctgactccatccactaaactgcacccccttcgctgaaggtgtatatccgtttggccattctatttctcccgctcccgctttagaattaagccattttcttattgcggattcttcccaaaaatcacttccccatcgtgaggacggatatccgtcttcacctgccgcaaaagttttaaaacatatagctttgtcacttactataagtttaccattgtattcatccgccatatatctccataatattggtgctccgttatagcttcctatctgaaaatatgatcctatttctattccctctgctgaaaccggaacaactgttaatataattgcaagtattgccgttaaaattatacttattatctttttcattgctttttctcctctgttgcagccctatttactgcagccaaacattcttttgtaccagggcggacaccagtttgggtccggggacggcgccggctgtttgtctatcactactcggtttagctcttctatatagtctacttttgccgaaaatgcttctgataccgctctcagcggtaccattgttctttctcctattattctgggcgccgcctctaaacttatttcctcctcttctccttttttatttttttccatcaccgcattgtctatctgcattactatttccgtctctccatccgttgctgttactacttctttctcttcgtcgcactctacctctgctcccagtgattcaaataccgctcttgccggcaccagcaatctctcgttttcctcaaccggcctctgatccatatttaattcttctccattactgtacaccgctacgccgttctgtcctgctccatccactatgtatgggtcttcctctgttccgctccctgattttattatcaaatttgcttcatttaaataaaaccctggtcgtattcccagttctctttgatgcgttcctacaattctgtactcttttccatacattattgatgtaactccatcatgtcttccataatcatatgctgctctatccgtacccggagttataagccaataccagcaaaattcaccatcattctcttcatccggtattgattcatctgttctttttgctcctactattctaaaattatcccacatgtcatacacttgcaattcattcaacaaaaacactgtgtcagatatttgatacatagctcctctgaacgcatctttaaattccgaaacattatttgtatgtactgcctgcggttctctaccactaccaaatgtgtatccggcaagatatggtcttgtttctccattttctgcaagctctattctattttttggcagcatctgccattgattcacggtcttcatcaacgataactcatgaaaagaaaagttgttttcatttaaaaatcccgcctcgtctgcatatggatattttacatcctgattccatccactaaactggactccctccgccgacggagtccatccattaggccattctatctctccagcccccgctttagaattgagccattttcttattgcggattcttcccaaaaattacttccccaacgtgaagatggatatccatcttcacctgccgcaaaagttttaaaacatatagctttgtcacttaccataagtttaccattgtattcatccgccatatatctccatgatattggcgctccgttatagcttcctatctgaaaatatgatcctatttctattccctctgctgaaaccggattaactgttaatatagttgcaagtatcgccgttaaaaatatacttattatctttttcattgctttttctcccatctatataatctgattattaagatactgcaaagcactataactccaattattatttattacaccatttgttatatcaaaaatcagctcatttgtgtactcataataatattcattatcgccaatcatattataaaattcataatattttctatcacttccatcactttctcctataccatctccatcaaaatcttcgctccaaatatcattagaagtataatcattattttcgtatatataatacaccccaaaatatgatggatgatttaatacgttatgcctattttgattattggcagcagctccataaaaaagttcattatatgattgttcattaggtcctccacaatatattccatacgaggtagcattatcacgaataaaatctttataataattatatgtaaaagcaaaagtgtcagatttcatcttaggtgagaccctatttttgtattcaccatgaattcttccggatacaagagaaatatcatattctaactcaaacgaaattgtggtatctgtatttttcttattatcaatcacactgtttccgtaatacataatattatctctagaactatttctaagattaaccactctgttgggtatctgatcacccaatttataatcagaaaaatacaaaccgggctgaaccagaactacatcaaacaaatcagatataccattattgcatgatttccctgtgttaacataacttcctattttctgccagtcattatcatctgtgcagtacggcacccagagaagctttttgccccagccatgtaccatgtctgatatattagacatattttggtatgaaatagttgcatttccatctacgtcatatctctcatccgggtcttcacgtccataatatatcccgtcaatacattcttctcccacacttgacgttaaattataataaatatttcttgccatttccttatacttatttaagaagaagtcctgagcttttttcttggtgtccagagttcctcccagatccttatcctcaacgtcgtaatgatatgtatgcggggttccgatataaacttccggcatttggttttcagaaccataatattcctgagccgcctctttcatataatttattatctgttcatatctagcaactgtcaattcctgtatgctttccagccgcatttggtttaaatccttcatataaacttttttagaacgctgatatcccgccggatttaaatcaaaatctaaatcacgcaccgatatcacaaacgcagcttttttatctccaatcaattcatagtattttttgaagaattctttagaatactgatagcttcctgaaccagagtcgttgcgatatcttgacggcgagctgtcaaaaccatacataattgaatcgtagagcattatatacactgtcttttcattctcaaactgacctgacggcgataatgttatttgataatcccgcatatttttatctatcattctttgatattctccgtcaggacaataagctcctatgtaatatgtatgcccctgagcaaaatcataatcaaagctttttccgattttctttagttctccatctgcgaacagcgccgcgcttgcatatccgtttgtctgaatcttcttacgttccgaccggtcagaaacataagtagtccagtctacgtcaagctggttatcaatggtaccattcgtatatgatgcgccgtcatacccgccgaattttggagcgttcattccattaatagttctataatcatttgttatcataaaactaacgtactgtattccaacaagccagggatttgacaaaaattgttcctcatccaactcattatcgcgaacagtatcattcaccttactaacattcatgctgtaatttatccgacttcctatttcaatatcatcatttacaatctttccaatatctgttctccctacatttatataacataatcctgttgacggcataatccaagtcaaaaatttcgtgaatttattgtatccagtctgatatatatcattctgaatattaaccatagtacacgtgttagtatacgacaaatccccgtctatatctatttcatctcctatcgtataatcatacatcagcgctgtggtatactcttgggcaatttccaaacttccctcaatttctatggaaacagtaagcttatcacctgcgctaacttccaccggatatgcatcaatatctataaaactgtcaaaatttaaatcatttatagcttctgtttgttgttcatacccgcctacattttgattaaatctgtaaattctttgatcatttctattcatcaatccaatttcaaattcacactgattaggctcgtactcatcaggatgacaagttctaaaaatcttgtggatactgtttccagttctagaataatcataatcatcaatatagtttacgttttccaaagcgactgtctcattctttcctgcaacataatttgaaaccgatactttatttctataaaacaaagaatcattaaaagaccatccaaaccatttgtacaagtcatcattatatttacggcatatagatgtgttgtataaaacacgacttggagtcgtccttatggaggttaccttatctccatcatttaagctaaacacatttgtctcccttttcgtaagcggtttgttctctgatattaaaatgtccggaataagcgaatcgctatgtgtatgtaaatcggcaagactcacagattcttcattaggttcatcgggcggagtgtaattaggtttattggtaaaccctgcgccattcatggctgcgctgtttgcttttattctttccggtgcattatcaaccgattcttcatattgagaatcactttttattaatataggatatctcttttccatcttacaattattataattatcacttttattttctgataattcaacacttagaaccgccaatttatcgccttcattaccgcttggtctgattacctttcctgaatcattaagataataactttgacagtgccattgaagttgtctgtcactttgagttttttcaggaagaacaatgtcacttgacacgccattatcatactgtgacatatagtcgtccaaccatttcatatcattatacttcgaacctgcgcatagttttggactctcaacaattatccccaaagccttatcatcatttttaccaaaagagtatagttgtcctgaattatccattgctattgaaaatccatttccaccaaccaattttgatatatttttatcggacagagcctttatttcaataggactttgtaccgttccatcgtgttcatatcccaaagcgtcatcctttccatatccccagccataaacttttccgtccgcagatacagcaaaactttgagtatacatagaaaatacttttttaatattagataatgtgttaactcttgtcggaatatttatatttatcttattacctagaccgagctgccctgaaccattacgtccccaagagtatacgtttccagtagatgttaacgctaaacaataatttgtaccgcagcttatatctgttataatttcaccggttatctccaatttttgtggaattaacacattttcattattgccaactccaagctgtccatattcgttagaaccccatacatacagtccatcgcttgcaagggcagccacaaaatcttctccggcatccaccattttaaaatcatttttatctgttattctaacaagttcattagatgttgcagtattcccctgacctaactgacctttatcattttttcctacccctctcagcgaaccatccctttgcaaaaaaatactgaactctgctccagcagcaatatcttttacattagatgttatttttaactcctgtgccgttcttattttaccaccgatatttcccattggataattagtgttactcccccaaccataaacctgaccaaaatcatttaaaacaagattatgatttttacctctcactaccttaacagcattatcaatattatcgataataatcgggctgccatgtgatgcttctttgtcactgccatctgcaaaatacccggttccccaactatatacctttccacaatcatcaattgcaatagtttgaagtctatacgaatcaacttctttaaaatcataatcaaaacttattttctgcggcacagatgttttcaaattatataaattgttctcaaaattactatgtccccacccccatatattaccatctatatcttttgctaaagatataattcctaatgagatttgatttacattttctaaatccattaatgaaaatgaagaattatcctgatatgcaccacacttatacagaactgaattcacacaataaacagactcccaaccaccagcaaatatagctgaagctgtaacattttcaatatttacaggtatcgcagaataagttaaatccgattttcttcccaattgtcctctgctattgtctccccaggtaaaaacagatccattttcacataatgcttcagcatgattatatcctgcctcaattttataaacatcagccataacaaattcaggaatgcttctatcaactgtgtcacttaaccctaattgcccgaactcatttttaccaaacgaatacaaacttctatcaagcctagtatagtatgaagaatacttaccggcagctatagaacgaaccatagtcattaattttaatggggaagactgtactccggatgattgactgttacccaatctaccattttcctgagaaccccagacccaaagtccaccttttgtatctaaagccagcacatgtttttcacctgccgcaacagctgcaacattctgcattattataacacgtatttctttgttttcagttgtaccgtcacctatctgtccacaatcatttaatccacatgcatataagcaattatcatccgtaattaaataagtggttttcccaccaatcacaacacttctaagctttccatccaaattacctaatgatatttcagtaaaccgttcttcaccttgacgagacccaacgccaaactgaccaaaagaattatcacctataaccgttaattttttactttttgttataaaagctgcatatccatctccaacagatacttcattggaaatgcactccacatcattctcaaaagaaataaaattgctgattttaaatctatctccatcaaataaatatgatgaaccattatattctataacatagttaaacaaaccgccattttcactaaaaccaaaatcacaataataccattcgtctttatccggtatgtacataactgacctgctatcagtaacacgctcatattcgtcatcaccatataccaacggagacgctcctccctgataaataaaaaaactaccaaaattcaataaatttccaccgccgcagccatatgtgtcactgcttgccggtctttcctgcatatttgtaaatttatttgtcacaggattatatactaacaatttatctgtatcatttatatcaaatccatactcgcctgttatataaatcataccattataaacaactgatgtaaaaccataaccatcaaaattaaagtttttatttgaattccattctcctgtttttatatcatatatatctaaacatggatcagcaactccagccccttcattgtttactgcataatctgggtcaccatacgctaatcccccaaaacaataaattttaccatctatgcagtttgcattaaaataagaacgatcatgcggaatgtcatctcccatactccatccatcctgatatgggtaatagatgtataatgagttccttgtttcatcatttggattttcatatctagaatccgaatctacaacacctcctataatataaatatatccatcgttttctacaattgcagaattttttattcctccacaaggaatagatgttccatatgaccacgaattattttcaatatcatatatcatagtcttatctccaaaacaatatatttttccatcctgttctatagacggactattgggatgtattgcaaaatcagaaatttcgctatcaacgtatacctggtcattttctatatactgacttatatttctttcagatgtttcattatcagcaaacaattgcttctcactttctatatccattgaaacagtgaatatataattataaatacattttatatttattgctgttgttttacttttatatccatccgcatttacagtaacgtattcaacttgagaatctactacctcaaacttggcaattccatcttctccagtaactgaacagtattctcctatactaagttccgcattttgtataggataaccattcctgtccacgactaatatatttatcgtactaatgctattttgattattactagtttcagataaaccgctatatttatcatcttcaattattttttcgtaagattccggttttgctgttacagttgaattaaaattatcattcaaacgcggctcttgagatgtctcaattaatatattttccggctctgccattcccataataggacttaacgagaaaataaaaactattattaatattacacatatagtttttttagttttatacatacatcaccctctaatattataaatattttataataagtatactataaaaagcaactaattgtcaatattttccaacaaaacaaacatttacataacatttcaaacatagtgctactttaaaacaaaaaaatctcttacagcaaaaagctgtaagagatttatatgaaactaaattattatctgctgctacccgaaaaatccggacagcagtctcacaatatcattccatgtagcaaataacattagtcctattaaaagcaaaaatccaataaaatgaacatatccttccttatccctgggtatcggcttcctgaatatcatttcaataagcacaaacagaattcttccgccgtcaagcgccggcagcggaaggagattcataacaccgatatttactgcaaggaaaccggcaaagaaaataaagtcagccaatcccgtttttgcaacagtgctcatagcagacaccacgccgacgggtccggataaatcggttacgctggcgcctcctgtcagcagcataccaagcgatacaaatacaagttttaccatccaaattgtttgataaaagccttcatgaagaacagacagaggatttatggaattctgcttaacggtaaatcccacataataatatggagttccatcctctaaggtggtctgcataggagtaaatttttcagtataaacttttccgtcacgtttatattttaattcgcattctccctcaccgctgtactgtcccaattcaaaagaaatatccctctttatatgaactgttgttccgttaatgccaactattttatccccgggctgcaaaaaccttgcggcgtcgctttgggattcaacagtgtcaatagtcgttgaggttattccgcctgttgaagccgctgaacttataactataattgttacaataataaatcccataataatattcatagccgctccggcagcaagaacaattatcctcttccacggctttttattagtaaaggctcccggactgtcgctttcctcatcctccgcttccatggcgcaaaatccgcccatcggcactgcacgtatagaatataaggtatttttcccctgtttcttataaataaccggtcccatacctatagcaaactcgtttactgtcacaccgaaaatacgggctgttataaaatgtccaagctcatgaataagaataattactccaaaaataataatagccgctaaaattgttaaaaacgttgacatatagtctcacgcacctctctgtcagtctcaataatatcgtttagggaaggattctgaatcgaactaaactcgctcatagcgctctctgcaatctctgcaatctctaaaaatttcaccttcccattaagaaaaccattaactgccgcttcatttgccgcgttaattatagttggcatggttcctccaatttttcctgccttttctgctaaatcaagacacctgaaagttttacggtcaggctcataaaaagtcattttacccaattccttaaaattaacctgcatatcagcagacggaagtctttcaggatacgtaaacgcatactgaattggatgcttcatagaaggaagagacatttgccctattatactgttatcacaaaattctaccatagaatgtattatgctctctctgtgaacaacgacttcaatatcatcaatatccacgccaaacagccatttcgcctctataacctctaggcctttattcataagcgtagcgctgtcaattgtaattttagctcccatatcccagttaggatgttttagcgcgtcacttttcgttacattcgctaattcagttctcgtctttccaaaaaatggtccgcccgaagcggtgagcaatattttttttacctctctgtgatttccggcaagcatactttgaaatattgcagaatgctcactgtcaaccggaagcagacgaacattattttctgctattgcttccataaaaagattacccgcggttacaagcgtctctttattggcaagagctatgtccttgccgcatttaatagcctgcattgtcggaacaagccccgcaaatccaacaatagctgacaaaaccatatcaacatccgagtctgcggcaaccattgacagcccttctgaacctgacacaacttctacagaggtatcagcaagagatattttcaattgtttcgcgtcatcctcattcggaacagcaaccagctttggatgatattttctagcctgcgcctccaaaagccttatattcttattcccggaaataccaacaacgtgaatattttttataccttttaaatcatctattacttcaagtgcctgggttcctatagaacccgttgagcctaatattgaaactcttaaattcaaatttttccttttattcattatatcaccatttttatattataataccaacaaaaatgaaaaacgataatgggacaggcagcaaacatccccctatccctttaccgctttcaaattaaagttataaaattattaaacatacacttttatataaacaaacttatctgagctgcaaaaataaaaacaaccggagcaaccattattatactgtcgcatctgtcaagcattcctccatggcccgggaacatttttccaaaatcttttattccaaactgcctcttaataagcgacgctgtaaggtcgccgatttgagctacaaaagacgctattacacccaaaataaacataagcagataactcatttctgctccgcctatatatgctgaaataaaagtattaataataaaagcaaacagcaaaaatccaaggccgcagcctataactccgccgacagctccctcaattgtctttttggggctgatatttgggcaaagcttatgctttccaaagagcttcccggcaaaaaacgcgcaggaatcagtcataaacgcacctaaaaacacaagccaaaccaatatatttccaaaatctaaacgtcttataaaaaggagatgagacaacataaaaggaatatagataaggcttataatcagcattgccacgtctgtaatcattattttacgattgctgccgagcattgccaaaaataaaataacaagatatccataggcgcatgttaatatttgtttcggaagcaaaaacgcacacaaagggagtataacggtccctagaaaaccaaacagacaaagcagcggtacttcttttttcatattcactgcgtcgtagaattcataaattccaataagcgaacacaatataaccgtacatagcataacccaagtcggagccaataaaatcaaaataataaccggcaccccaaccgccgctgttaaaaccctcatctttaaacctggtttcaaatcccacgcctcctaaagccgtaaataaactatccaactccaaataatgcgttcccggcaaaaatttcttaaataatccaaatttaaacaaagctcataattacaatttatttttatcaaatccgcccaaaacgtctgtcacggttctgataatctataatcgcctgctccatatccttatttgtaaaatcaggccagcatatatcactgtaccaaaactcagcatatgccgcctgccataaaagaaaatttgacagccttttttcaccgctgggccgtattatcaaatccacttcaggcagattcgaagtatacataagccctccaaaatactcctctgttatatcttcaacggtaatttgtctttcagaaaccgcagcagcggcaagcctggcagcattaactatctccgctctgccgccataatttaaagcaatattaagtacaagtccatcaccgcttgaagtgacttcttccgcatgaacaatcgcgtctttaattttctgagaaagaggagcaatatcaccgcttatttgaagcttcatatttctattcttaaacttctcttcaacagtcaaaagataattataaagcaattccatcagcgcgtcaacttcatctttaggacgattccaattctcagttgaaaacgcatatactgttaaagccttaacgcctattgagttgcaataatcacatattctctcaagattatcagcgccggctttatgcccggctcttcttggcaaacctcttcttttggcccatctgccgtttccatccataataatcccaatatgtttcggcacacggcttaaatcaagcttcccggaatgggctgttctcctccctattttaaaaaacacagtcataccccttccgaactgtctatacttctaaaatctcatcttctttttctttaactattgtatcaataagcttaatatatctgtcagtgagcttttgaatatcatcctcaaggtcaagaagaccgtcttcggtaatttctccggccttcttctgtttcttaaaacgctctatagaatcacgtctcacaccgcgtacagcaactttagcttcctcgccgcgctttgaaacttccttaaccaactcttttcttctttcaccatcaagaggaggaaagttcaaacgaataacctttccgtcattattaggatgaattcctatatccgacgcgttaatcgctttttcaatgtcacccaaaatacttgcgtcccaaggctgaataacaatcattcttgcttccggaactgaaacagtgccgacctgtgccaaaggtgtgggagcgccataatattcaacagttaccctatccaatattgcaggattcgcacgccctgctcgaatttgagataaatttctctctaaagcgtcaaccgctttcttcattttgttctcggattccttcatatctaacatccctttctttttatattataatttaagatactatagttccaatattctcgccgcacaaaaccttaacaatattttcaggttcatcaagcccaaataccagcaaaggtatatcattatccatacaaagcgttgccgctgtagtgtccataactcctaatcccttattaagaacgtccataaatgacaatttatcaaatttctttgcatccgggtttatatttggatcgctgtcataaacaccgtctatctttttagccaaaagtataacctcagcgcctatttctgcggcacgaagagccgccgccgtatcagttgagaaaaacggattacctgttccgcagccaaatataacaactcttcccttttccaaatgtcttccagctctaagtcttatgtaaggctcggctatctgtctcatctcaatcgccgtttgaaccctggcttcaacgcccagctgttcaagcgcgtcaagcatagcgagacaatttataacagtagcaagcatacccatatgatcggctcttgaacgatccataccctcgccgtcgcggcctctccaaaagttaccgccgccgatgactatgccaatctctgttcccatatcataacatttttttatctctttagctatagcgtcaatcttattatgatcaagaccaaagccttcgtctccagccatcgcttctccgcttaactttatcattattcttttgtatttcggtttcatttccattcccctttcaaacaagtatttcagctatattttaagtcgttaagactaatcattatccatatttaagtctctctcgcttgatccgctcccagaaacatttctgcttcttgaggaactgttatcttcttcttcttcgtttgacgagttagaactgcttctgtccgaagatttttctccgctttcagagttgtttttactgctgcttgaagaaccggaggcattacttttgcttgaatttgaggaacctccatactttttcttatatgaatcaagttctgactgtacaacatccagctggtcctgcaaaagctgagaatcgctttttagttttgtattttcgtcagtcagcgtctgcacctggatatcacgcttctctattggattgattatcatattaaatgaaaacacaaatgccgccataaatattgatatgtttaagagtataataccaataataagcatggatttcctgcctttagccgactgttttttttgtttctgagaatttatatcactcatcaaaaaattcctttcatagtatcataattacgataaaaatttactaaacggttttaatgtgtaagccattcgccgaacgaacctaaattaagagcgccggtaacaagcaaagtcattatagctccgctggtcattattcccaaaagcactgccggcaatgcatattttgctctcatatcaagaagcccggcaatcattgaacctgtccacgctcccgttgtgggaaaaggtattgaaacaaatatatatatcgcaacagccgccgcctttgagctttttctggatatatccccggcctttctatgtgttcttgcttcaagccatgtagcgaacttgcccaacaatttggtctttttcaaccactttataatagggcggaacgctaatagaataaacggaacaggtaaaaagttagcaataacagataaaacgtatataaataaaatattcaaaaagttgtgatcgacttgtgacaagccataaattattgagcctcttatctctgaaataggcataacagccaatataaaagtccagatataagtcattataggttcagtcatgaaataatcctccgataaaacagccaaacgctgggttttcatagaattcgaaacataaaaatattccgttatcattatatacaaaatatatttgagatattataccacgaaataactgactaggcaagatattttatgttaacaattcatcttttttgttcatattttacttaaaattctatctattcaattgttatttaattctttatcttcttggaggacgttttgaacgtgaacttcttctgcgcatttcagccagctttatatttcttcttatattaattatcatataaattataaatataactaaagcagcagccaaaatgactattaatatttttacgaaccaaaaactccatatataactaaaaaactgcataagaaatccaagcggatgacgctttacagaaaaatcagctattaagtctccgctcccaacaacttctccgttaagaacaacgttaactgttcctatcttgtccccctcgtttacaggagccgccatatattcaggcagagaagtctctatcttcaagtcctctgaatttgcgtcctctggcaccgtaactataatattgctgttggttgataatgttgtatggtctgtgccgcttccgaaacgcacctttatctcgccgaccatatctccttttgttatggctgtcacagccttataattatcaatagcataagccagcagattttttgaatcgtaatgtctgtcgtcctctgtcttgcaattcataacgacaccgataacctcaagatcgcctttctgcgccgaagataccaaacaatacccagcctggctcgtgtgcccggtctttatacctgtcgcatactggtaaaaataattgggatattttaaagttgacaacaatccgttcgtgtttatcagcgttcttgccccaactttatctgtcgccggaatatttgcctgcgacatagcaacaatactcctaaaagttttatttttcatagcttctcttgataacgtacataaatccgcagcagtcgtataatgttcctcgtcatgaagcccatgaacattcatataatgagttccgctaagaccaagttcctcagccttgttattcattctctcaacaaaagttggaacatctccgcaaacaattacagccaaagcctgggctgcgtcgtttccggactccaccataagtccctcgagcagatattgaaccgtcatggcttcgccctctttaagctgcatactggaaccgtcggcaggcaagtcttcaagcatatccggggttataagaaaggcagaatttaaatttatctcgccgcggtctattgcttctaaagttagcaaagcggtcattatcttagtagtgctggcaggataaatctgtttgtctgaattttgttcaaacataacttctccattcagacagtttactaatatagcggcctcctgatcagccaaaatcggttttccgccgtcgccgactctcggatttttagttggttcggcctttggttccggagttgctgtagcttttgaagaagcagatttagaagattttgcggccggagttgatgtaggtttgcttccccttatggtaccgctctccctgtcatcgtcatcatttgtcttcttatcagatttaacatcagaatttgtatctgaattatcttcttcgtccgaattatcctctttatttgtcctgacagtggatgaatccgatgaagaagttccgttttcagaataaatcaatacaggtgaaagacaaattgctgcactcattaacaaaattaaaatagctgaaaaaattcttttaaatttcacgtcttatgttctcctttaaatttcttttgtttcggtttttctctccaaacgttcacgctcagcttgcgaaagccttatataattcggcgcgagttccgcataactaattgtatctcccgaaagcgccgcctcataccctaattccgctacagagccggccatattgagattgttgtttccctttgcaaattttgcattatctcccaaaaattctaaaatttcttctctataaaccaaaaccccgtctcctaaaaacaaaaccttttttttaatatttttcagctcgtccaaaagagattctaaactaacggctttatcctcgcaaacacgcgttagagtaccgtctcctaaaaattcagcagtatatacctggtttctcctggcgtccaaaatcgggcaaattatcccgtcaaagtatggaacgttattggccagcgcttcaagcgttgaaaccgctgcgcacggttttcccgcagcatgcgccatcgcttttatcgttgccgttcctattctgacacctgtaaaagaaccgggacctgccgcaacagcaaaacaatctatatctgcaggttttagttccagcgaattgagcaaagcttctatttgaggcattattttttgcgagtgggttttaccgcagttaactatagcttctccaaccaatttttctccgtcatacactgcggacgtcgccggcatacaacatgtgtctatccctaacactaacatatctttatctccctgtaatcttcacccttttcaggatacgcctttatttcaacccgtatagtcccttcgggcaagatatttttaatattgtcagcccactcaataattgttataccattgccaaacaaatactcatcaatccagtcgcattcatcaagcgcggggttgtcgagacggtatacgtcaaaatgatatattggaatatcaccgccgtattcgttaaccaaagtatacgttggactcaatacatcatttttagaatgaaagtattttgctattcccttaacgaaagcggtttttcctgctcccaaatctccaaccaaagcaataacatcgcccggtttaagctcagccgccaattcaccggcagctgacgcagtatcctcaaccgagttagacttatatattttcatatatttacctctatctttagtttcttcaataaaatgaagtctttattatattatattgacattatgcaacaaagtcaatataaacctattgaataattttaaaaaataacttataatatagataaatttgtttttgggagggctataatatgcaaagagtcgacaaagcgaactactatttggatatagcagaaacagttatcgaacgcggaacttgtctaaggcgcaatttcggagctataattgtcagaaatgatgagattatatcgacaggatatacaggagcgccaagaggacggaacaactgctctgacctcgggttctgcatgagggacaagcttaacattccccgaggcgaaagatacgaaatgtgccgaagcgtgcatgcggaagccaactgcattataagcgcctcacgccgtgatatgattggcggcactctatatttggcaggcagagacgccaaaacaggagagcttgtaggtgacgcaaactgctgtgcaatgtgcaaaaggctggttataaacgccggtatagaagaggtaatagtacgccgaacaccgacagaatatgaagttatccctgttgataaatggattgaaaacgatgaatcgcttgaaggcaccatggggtactagacccggagggattatatgaattggaccgcagctcagaaagaggctattacatatgaaaacaaacagaatattcttgttgctgcagccgcaggaagcggaaaaacagctgttttagttgagcgcataatcagaaaaatactagaccctaccgaccctgtttccgttgatgaaattcttgttttgactttcaccaacgccgcagccagggaaatgaaaaacaaaatagcagccgctatagaaaaaaagctaaaagaaattcctgataatcagcatctcaggtctcaaaccaccaaaattgccgcagccgatgtttccaccatccattcgtttgcccaaaaaataatcagcaataacattcatctaacaaatatcccggccggtttctctctaatcggcgaagcagaaaatgaacttttgcttaaagatgccttagaagattgtttggaaagatactatgaacgctttgacatattgccatcttttaaggagctcactttaggtcatggcggaataaaaaatgatgataatctcagacgtgcaatcaccaatatatacaagttttcaagaagcctggcagaaccatcaaaatggctgaacaactctgtcaaaatgtattttgaagtttataaatcaggtactgtatccggcacagagtgggaaaatatatttcttagctgcataaagaattcaacaagacaaattcttgactattacaatacaattattgaaatatcagaaaaggaactgcctgaagaacatacacacgcagtattctttgaaaaagaagcagggatgtttcgtaatataatgaagtgcggcaatattgaagaatatatagagaatagacaaaacataaaatttttaaccagacccagaatcagcaaaaaagacaaagaagacgcgtatcttgccgaagtactcaaaaatatagcagatataagagaagaagcaaaaaaactatttaagaataacaaactgttttcatatgaaaacatagatagtttaagcggctctataagtcttttgtatcctcggataaaaacgttaaaaaacatcatacttatgctggaacgcagacatacacgtctgaaacttatgcgttcctcccttgacttcagtgatttagaacaccagcttattaagctgataattaagagcgacggctccccgacagaattttgtaaaactttgagcaataaatacaaagcaatatttgttgacgaatatcaagacacaaataatattcaagacaagttatttcagcttatatcaggaggaaaaagaaacatatttatggttggagacctaaaacaaagcatatatggatttagaaacgcgtctccaaaattgtttcttaataagctgaccgaatactccggtgaaaataacaacggacatcttatacgtctgtcagacaatttcagaagccgcaagaatgttatagacagcgtaaactatctatttaaaaacgtaatgtctaaatctacagcagaaatagactatacagaagatgaacggctgcaaagcggcgcagattatccggaagttaaaaatccctcagattataaaacagagctgataatgactgacgtgctggacaaatcttcgggttctgacacgcgcgaaactgcgtttcaaaacaaacatgagcttgaagcaagaacagttgcagaaagaatatcaaaattggtgacgtttgataaactgtctgtatacgactcgaaaacaggagaacaaagaccggttgaatatggcgatattgttattcttctccgctctacaaagaatacagctcctatattcgaacaggtattaagagaatataatataccggttatttctgacagcagcgaaggttacctagacactattgagataaaaactgttttaagttttttagagataatagacaatccactgcaagacatacccttaattgctgtcatgagaagccctatctttggctttacagccgatgaacttgccgaaataagaactttaaaccggcacggcaacttttattattgtgttaaaactgccgcgcaaaacgacaatacaaaagccaaaaaattttttgatgttttaaataaaatgcgcggtttttcaaaatatatgggtacggatgaactcatatataaaatatgctatgacctagattatctagcggtagccggatcaatgagcggcggaaatatcaggcaggccaatctgaaaatattgcttcaaagagcgggagattatgagagacgcgcttttaaaggtcttttcagttttgtagattatcttaacaaaattaacgacagctcttcaggtatgggacaagccaaaagcaccaacggcgcatcgtcagcggtatcaatcaccacagttcacaagtcaaaggggcttgaatatcctgttgtaattttagccggaactacttacggcagacccggcggagattctgttctttacgatgaaaaatacggtataggaatggaatatattgatgtagataaacgtataaaacactcatgtctttcattagatttaatcaaatataaaaaagcgaaagaatcaaaagcggaagaaatccgtcttttatatgtagccatgaccagggcaaaggaaaaacttataatttcctgcaccaatgaatctcccggccagtcaaaaggctggaaacgtccaattttgaacacacgcggagaaatcatcagtccatattttgaaaacagcaaaattttcagggattggatagtattgggatacttgccgcaaaagaacgcagaagaacttagagaggtaatggaatccgacatatccgagctaaaaattgatgaagctcagaatattcaattcaaatatataagttatacggatgaaaatataaacttatcacaaaaagaatcaataacctgtgaaaaaccaatcaatgaagatatatcgatttcaaaaccaacagacgagcccataagcaaagagctcgctgacgaattgtataacaaccttaattatttataccctaatgaggaattgacccgtatccccttaaaactttcggttagtgaaattaaaagaagcatgcaggacagtctaaccgagcaggatggtgaatatactccgattttaagcagtatcgccgacagaacattccactctgcctccagcggagacgccgccgaaatgggaactattactcactacataatgcagcacataaacccggagtttactcagtctgaagagcaaataactgaacaaataacatcactttatgcaaataatattttaaccaacagtcaaatttctttaatagataaagattcaattattaaattttacagttctgaaatcggctgccgaatgcggaacgcatatttaaaaggaagtcttaaaagagaatttaaactgttgtttcctgtaagcgcttcagaaatatatggagataaagttagttctgattccaaaaacgctcaaatcattgttcaaggcgtcgccgactgcttctttatcgaagacaacgagatagttttattggattataagactgacaactgttctgccatttatgcgcctaaacaagctgaaaaatacaaaatccaaatggattattacacaaagggcattgaatcaatatttggaaagaaaataaaggagcggattatattttttcttaaacctggaacagctgtaaatatataagccctgataaatactgaaaacacacaaaccggcaaaattaggaggaagtccaatgaaaggtttagtattatctataacagcaggacaaggacacaaccaaacagccatggtgatcagcaaacgtttcaacgagtgcggcgtcgaatgcaaatatctggatgtatacaaatttataaacccgattttatcagattctgtaaataagatttatcttatgtccaccaaagctatacctaaaatctacggcggcgtatatagaatgtgcgaaaaacgcggagtacagtccggtgccggcatacacggactgaatagaataacaaattcagttttgtcaagaagtctgataaaacttattcaaaaagaaaaacctgattttattatttgcacacacatattcgctgcgctgctggttacttatatttcatcaatagaacatcttaacgctaaaactattggagtaataacagacttcactatacatccttactgggaagacagcttgcttgattactatattatcgctaatgaaagacttactatccagggaataaaaaagggctttccagaaaacaagtttttaccgctgggaataccaatcggtactaaattctcaagaaaaattgagaaaagtaaggctaaagagattctaaatctccacagtaaacatacaatacttgttatgagcggaagtatggggtttggagctgtatataaagaaattgaagaattggataagcttgatatggattttgaaattgtatctgtcagcggaaacaataaaaagcttaaaacaaaaatagacagtatggaaacacggaaaaaaatatacagttatgggtatatcaacaacgttgatgtgtttatggacgcctgcgactgtattataacaaaacccggagggcttaccaccagcgaagcgcttgcaaaacagataccaatgcttattaataacccgattccgggtcaggaggacagaaacgtagagtttctattaaacgccggagcggccatgcggataagcagcacaaatccaatagatgaagcggtttatcaaatgtttgttaacgatgaccggatgaaacttatgcaggaagcaatgaagtcaatagcaaaaccaaattcaacacaggatcttgtggattttgtaatgaacggcttagaataaaattttatattttaaataaatacttaggaggaaaaatgaagctttgtattgctgaagctctatgcaaggtctaatagggacgaaccgcatagagcaataaaatagaatgtccctaaaagactttgcattttatgagataatttcaaaattaaaaggagcaaagtcaatatgaataaaataaaaaaattaatatatgagctgcattcgtttattatactgtggctcacacaatcattttcaaccctcggcagttcaatgacaaattttgcgttaataatatggtcatatcagcagcaagggtccgctttaaaaacttcaatgctttcaatatgttcatatgcgccttatgtcattataagcatatttgcaggagcgttaagtgacaaatggaacaaaaaagcaactatgcttgtctgcgacagctttgctgctgtttgcactgtatctgtcctgattctgctgctgtttggcaaactgcaaatatggcatttatattgtttgaatgcactaaacggtcttatgaactcaatacagcaaccgtcagcagatgtaactatcagtctgcttacacctaaaaaacattatcaaaaagcgagcggtatgagagcattctcaaattcattggtaaacgttatgactcccgtcatatctaccgcactactggcgctgagcaatattcaaacgattattgcgtttgatttatttacattcggaatagctttcttatcactgctgttctttgtaaaaataccaaaagttatatcaactgagaacgctaaagcggaatccgtgctcgaatccgtcaaaagcggaatacggtatcttagacacaaccgtggaattttagacctcatactatttttggctgcaataaattttaccgcttcagtttttgaagcagcgcttccggccatggttctatccaaaagctccggcagtgaatctgcactcggaatagtcaatgcggtatcaggtctcgcaatggttggaggaagcatactcgtatcactgattccatcacccaaaagccgggttcgtataatttgcaattctcttctgcttgcaatgagcacagaaaacttttttcttgcatttggaaaaagcgttcccgtttggtgtatcggagcatttttaggatggatagccatcccgtttatgaacgcaaacatggatgttcttttcagaaaccatatacctcttaatatgcaaggcagagtatattctgcaagaaacacattacagtttttcactataccaatcggttactttatgggaggattcttggttgacaaagtgtttgaaccgttcatggcgtcacaatcagccgcaagcatatttgtcacactatttggagaaggcaaaggcgccggagccgcttttttatttttatggctgggatttatcggacttgtcacatgcttaatctttagaaaagacccgcatatatggcagctggaaaaataagataactctcacacaccaaaactaatattatatataacctattttactttctctaagatataaacaaactacgaaaaagattttaaaaatttaggacaaatagcttgctttatataatagagaacccattttataacagccttttaaatgaatatagtcttatatacaaaagactgtataaaatatttttaaagaatttgtaattttcaaatcttaggcactgttttcacttcattgttaaagcgaacaaaaataggacttcaattaagtgagctaaccccaattgttagattcttggtctaacattcggaatccgctccaaacaaaatgaagtcctattttttattgcaaattataaccgctttgtcctgcttgccagtattaaaaacagcttaaaagtatatgctcctatcccgaaaaagcgaagtggattggtctctcaaattggattttgctaaattaaacacttacctaaattaaacgcttcttctaacggtggattatttttaatatcgcccttgtcttttataccttttactaataccataccaatgctgtctaactcaaatctgtactgactatcaatttctctgagtctttggagttggagtatgttttgattcgtttttagaattatcatttttcggagttgatgtgggattttcttcatcctgctcttcatcatccgctaaaccttcatcatcctcatcatctgtcggaataggagacgctttcggtcttgccgaagattttgaatcctcttcatcactattcggctccggactaacttccagcactttaggttctcctgtttcaatactgcgtacatacagttttgaatccctgaaatccaatattgattcttcatactttgataggttactgtcaataacagaagttacgaattttactttataatcaaagttatcaaatgtaccaaaccatacttccagtctgtcttcgacccaaaacttcacatcatttatgttatttacatctattttggtggttctttccaaaagtcccgcttttgataaagactttacagcttctataacattgtccagcttgtcctcatcattactttgaatcctatgtccaacttgatattttgttattccaactccatatattatcggagcgttgtaaataatttcaccatttgaagtccggttcaattcatcaaaattatttcctgattccaattcagttggctcctctgaattctctgccgacggagaactggtgggtgaatcatcaacaaaatatctattgccgtcattgtcaaactcgtaatgaccgccgttcaccttgtatattgggtctccgtcatcatcgtagccccaaatggaatcgtcctcagtttttgtatcctcttcttcaggttccggactgccggtgggttcaactatctcctcttttattttagacgatgttatttgatacacatcatcattgttagtaacggtgtcaacaacccgcccgtttgtgtctgtaacagtaagaaaatctccgatgctgaaataagccgccggctgtctttcagtaattgtaaatttaacagtatcgggaaaaacacggcttacctgacaatcctccacatactctaatgattcaacattttttttcggagaactcagatttgtcaaaaaaatatttccgcccgttttaatttgtgaggcatcaacaatggcatcataacttattttgtcattaccctcgcaaactatattttttatattaaacattggtgccataagcaaaaaacaaagggcaagaactgctaaaacaactactgacagcacagatatagctgttagtttccgtcttgcccttgctttttcaatgtctattctgctctttttaatgtttcttttcttttgcatgatattctcctataacggctcttcagtttagtatacaatacgaatgtcagcacccaaagattccaaatcactgactatatcctgatatcctctttcaatatgcggcagtcctccgactctcgtcgtaccttccgccattaatccgcctattaccatagccgcggcgcctctcaaatcatatgacctgacatccgcaccgcttagaaactcccgtcccctaacggttgcctgacacatgtttacatcaatatcagcacccagctttgccagctcagacgcatgtctgaaacgattttcaaaaattgattctaagaacaccgtagtgccgtccgcaaccgtcataacagccataaacggcggctgcgcgtcagttggaaatcccggatagtataaagttttaatggtgttaaccgccctgggccggccgctcatagatattatggctccatctccgatttttcttatatctgcacctatatcctttaaaattgaattgcacattgaagaatgctccaagttgattccctttaacagtatctctcctccgcagcctgcaacagcggccatatatgtaactgcaacaattctatccggcattatttcaaaatcagcgccatgaagcttttttacaccatttataacaataacgtcactgccggcgccttttatgtccgctcccataagattcagaaaatcttgaaggtctacaatttcgggttctcttgccgcatttcttataactgtctcaccatccgactttgccataagcagcattatattttcggttgctccaacactggggcataacagcgatacagagcacggtttaagtttagattttattctgcagtgtataactccctgactttcctctatctgtactcccagctttctaaaagcctttaaatgcaaatcaattggtcttgctcccaattcacagcctccgggataaccaacgtccgcctctccgattcgagacagaagaactcccagaaacaatattgaagaacgcatcctgttcatcatttcaggctctattgtgcttccgaaaatactctccgccgaaatatttgctaattcgcgttcagaatcataattacatcggcaccctagcgtctccattatttccaaagtattttcaacatctgaaaggtaaggacatctgcataaattacagcaccctttctcacacatacaacaggcggtcagacatggcagagccgagttctttgaaccctgaactgaggtctctccaaaaagacgccttcttccgtttatagataaataaccgtcggtcaccaaaatctcctccatctggctacattaatattctttcacaatatagtatgcagtcaaggacggtttgtgaaaagcggttattgaatatactaattattcttcagcaaacgtttcgcttcacgataaatttcttctgtcgctgctgtagtgccaacacttttagcggctcttctcatatttttaagcttttctttactgcttacaagactttctatatttttgttaagaacttcagcagtaaattcattttccaatataactcttgctccgccttctttttctattgctctggcattatgttcctgatgattggcagtaacatatggagacggcacaagtattgaaggttttcccaatgcagttaattcgctcagtgtgctcgccccggcccggcagacaactaaatcggcggccgacattacaatattcatatcataaatatattcgcttactctaacgcttcggtatttcttcaggtcaataccattgttctcaaatctattaataacatcatcatattgaaaatattttccggtacccatcatgatttgatacttattatcttttataatatcacttatccaatcaaccactgtcttattgaaatctttagctcccatactgccgccaaaaaagactataaacggacgctcgtcaagctttaagacgcggcgggcctcaaactcgcttgtagataatatagacggacgaacaggattacccgagtaaattatatgtttagctgattttatgtatggctcggcggcttttgaaccaagagcaactgtgtcgacatatttagataaaatttttgtagttactcctggatatgcgtttgactcgtgtataagcgtcggtataccaagttttgccgccgcaaatagcacaggccccgcaacatatcctccggtgccgataactatgtcaggattaaacttctttataattttttttgaatcatgaatgcttttaggaagttcaaataaatttttgaaattctgaaagttaagctttctttcaaaaccatgtatctttataagtgacaaatcatatcccaaacgtggaataagctccgcctcaagcccttcctcaactccaacgaaggctatttgggagctttccttatcagcaatataattggcgatagcgacagcaggattaatatgacctgcggtgccgccgccagcaaataaaattctcattataacaccttctcctgcctggagacgttaagcaccaagccgatttcacccatagttatagccagcgctgttcctccgtaactaaagaaaggaagcggcattcccgttacgggaagcgacgctgtaacaacgccgatatttatcatcgcctgaaatcctatcagacctatacatccaataacaataagtttccccaaagtgtccggagccttctgagctatacgtatccctctgtatataaggaacagaaataaaactataaccactatagctcctacccaacctaattcttctgacaatactgagaaaataaagtcattatgcggttccggcagagacatgtatttctgtctgctctgtccaaatccaacgccgaacacaccgcccgaaccaatggcataaagagactgaacaatctgccagccggctccttgcttatcggcaaacggatcaccgaaagacaacagtctctgcagtctgtaaggttcagcaaatatcattgccactccgccaataaacgcaggaatagccaaaataataaagtgtcttattttcgctccacccacatacatcataagcaatgttgtaagggttatcaatatagtagcgctgaaatgcggctccatcatgagcagcgctccgactactcctaaaatcaaaaggcaaggcaaaaatcctcggaagaagttacccaatttatcctggtatttttccaaatatacagctacaaccagtaatgtcgcaaattttactatttctgacggctgaaaaccaaacagccaacgggtagctccgtttgaggttgttcccactccggggattaataccaatatcaaaagaataatacatattgcatacaataccggagacaacctggcaataacatgataatccaccatcatacagccaatcatagccactatacctactagaagtccgccaaactgacttttcataaaatacatactgtcgccggtagcagcataggcccttgaactgctggcactatacagcataatcataccaaacgcaaccaagataatcgttgtcaataaaaactgataatcgagcgcgccgcgtcttatttttattccgcctaccctaagaaagtttttagcagtatattttactccttgattttttgacgcggtttcccggcgaggaacttgcgttctaaccggttcctgtatcctgctctgtgatttttttatgtaactgctctcataatgtttgctctgcgctctgttttgcacaggttcattatgactgatgcttttataataatgtccgttgtttctattttcggagtttctcggcgttttactatatttacttgaagcacgccggcctatattattgtttccggctttttttctcggatttctttcatctgacaagtcgatactcctcctatctgcacataaataaaattaaccaaaataatacatcagcgcgcaaagcaaaaccgtcactgctgagaatacacacacaattgttacttcactccacccgcacatttcaaaatgatgatgtattggtgacattttaaatatacgctttccggtcagtttatatgacgttacctgcataattactgacaacgtttccataacatacacaaatccaacaattaaaagcgttataggctgtttcagcattatagcaagaccgcacacagcgccgcccaaaaacaatgaacctgtatcacccataaaaacttttgccggtttccagttaaaaagcaaaaatcctaccaaagaaccacacaaaactgctgccagcaacgacatagcatgattgcccatacttgtagaaatcagcatataaaatatcgaaataacaattgttatagaagtcgctaaaccatcaagcccatctgtcaaattcacactgttaacggttgcaagcattacaaaaatcacaaatggtatataaaaccagctcaggtcaaaatccaccgaagtaaacggaaggtcaatcaccgttccggtacttcctccaatcgccacaacagtagcaaaaatcagagcagcaacgaactgaagactaaatttctgggcggcggtaagacctaagtttctttttttgaccacttttatgtaatcatcgataaatcctatagctccaaatgccagtgaaagtaaaattaccaaaactaaatccactgtatttcccatagaaatcccgtcggacgctgtccaaacaaacattgcaacgagggttacaataatactcaaaataaatattattccgcccattgtcggcgtccctgatttgcttgcatgccacgccgggccttcctcacgtatttcctgaccgaattttaatctcctcagcattggtattacaaatattccaaataatactgacaatactaatgctataactccccaaatcaagtaattcataattaccctctccaatcaaaacagttttagctctcaatactatgaatttcccatcttatcaagcgcttccgcaactttctcaagatgcatacctcttgagccttttatccatataacatcattattttttattattcctccaagacgcgatatagccgattcgttatctccgaattcatatacatcgcttgagttaataccgccgtctattgcgcctttggctatgtttccggccatatcgcctattgttatcaaacagtcaatccccttctcggcgcacatcagccccactttataatgttcctgctccgaagtctctccaagctccagcatatcagccaaacaagcaacttttctgctgtttccaccgttttcttcagccgttaaaaccaaaacgtcaagcccggaacccatagaatcagggcatgcgttataacaatcatttattactgtaaacttaggataatttgtcttaacttgtcttaatccctccggcacaaaatcgtgaactccctttatcatgctttccactttaaggttatatctatatcctacaagtatcgcggccagcgcattatatatatgatgtatacctggtgcattagtctcaaatttatagtcaacaccatctatttttacgttaaactcactgccgcacgagtataattttatatccgtcgctacaacgtcacaggatttattttctataccataatataaggtttcataatccagctctccatttttctcccagagaaattcatcatctccattcaagataatggttccgtctatagacaaaccgtcaagaatctcaaatttagccttgcatattccctcttgactgcccaaatgttccatatgtgaaataccaatattggtgattaccgcagtatccggcttaactattttagaaagccttgaaatttcaccaaaagcgctcatacccatttctataactgccgcttcgtcgttatccgtaagtctaaaaatagtaagcggaactccgacctcattattataattaccctccgtcttcagcgtaacatattcgttgcccaatacagaggctatcataccttttgttgaagtctttccaacgcttcctgtgattccgactaccggaatattaaattgttctctataaaacgcagctatatctctcagcgctttgaatgtgtcgtctacagcaacaacaggaagatttccgaaacttccctcctctttgtcaaccacacagcatacagcaccgttatttacggctctctgaacaaatctatgaccgttattattttctcctttaagagcaacaaaaacagttccgtcggatacttctctgtcatctctgactacgtttttaactatctcatctccgctgcaattgtaagctattcctccggtgatttcagcaagtttgttgatattcatacaccatttcataaaactatctccttagtaatccactgacttccacacaatcacaatcaaattcataatattttgttacaatattgccgtttaaacagcttgttattatttatcgtaacatcctaaaagtttttgaactatttccctttcatcaaactttatagtatctttccctaaaacctggtaagtctcatgacctttaccggccaataatattatatcattttttttcgcgtggtcaagtgcatattcaattgcggagaatctatttgttataacctcgtaatcacagtctgtctgttttactccttcaacaacctgctttattatcttttcaggatcctcagttctcgggttatcacttgtaactatacaaaaatccgagagttctcctgctatcttgcccattattggtctttttgaggcgtccctgtcaccgccgcacccaaatagtgtgactattcgtccttttgcaaatccacgtatggcgtttataacattcaaaagtccgtccggagtgtgcgcataatcaattataactgtataatttgtacccggcgttcttactatttctattcttcccttaacgcctttagcactatgaagaccgtcaacagccaaatcaagaggtatgttctcagccatacagcagcctatcgccgtaagcgcgttatataccgaaaattcaccgggtatcggcaagtcgacgtgttcttccataccaccgtaatttatatcaaattttacaccgtcttcattcagaattatattagacgcttttaaatcacaatcctgatttataccgtatgttatcatattccggcaccttgcattttcaataagatattcgctgcgggcgtcatctttattgactacgccggtattgcaaatattaaacaatatgctttttgccgccaaatattcctccatagtcttatgaaaatctaaatggtcctgggttatattggtaaacgcccctacatcaaacgtacacgccgtcactctgtcaagagccagcgcatgagaagaaacttccatcacaacataatccacattatgagaggcaatcatatcaaacagctgcatcaactccaaagagtctggcgttgttcttgaggtttccattatcatatcgcctatcatattttgatttgtgccgataagcccaactttctttccaagatgttcaagaattgatttaatcaaataagtagtcgtagtttttccgtttgttccggttattcctataagcttaaactttttataaggataatcataaaaagttgccgccatttcagacatagcctttcttgtgttgtcaacgataacacaggggacgtcaactgtaggaaggtcatgttcggctaccacagccaccgcaccgttttcaacagcagacttagcatatttatgtccgtcagtctcataacctgttatgcaaacaaaaacgtttccaggttttacttttctggaatcacaggctataccacttattttcatgcttccgccgccatctatttttttaatatttacatccttcaacaattctgaaagtgtcattattattcctcctgtgtaatatcaataaaacttttcttattctactatatacttataaaactcaatttatttgtaaaagttataagcttagatttttaatttataaatttttattaaaacctttagaattatgtatttttcgctttatctcattacataatctttttgattaaatatgattacttataatttatataaaatatattttatggcgcacacttttcgtgattattttactgttataatgttgattatagttatttatattatatagctaatataaataaaaagtcaattagttattatgatttagtagaaatttatgtaaatttctttgcttgtttgcggctgcgcaccttgcgcggcggtctttgaccgccctaccgttgtttgctataaattactcttattttagcgctatttttattttgttggcaattaccttgttatgtttttttgatttattttatatatctgcttatttgcggctgcgcaccttgcgcggcggtctttgaccgccctgccgttgtttgccataaattactcttattttatctctatttttattttgctggcaattaccttgctatgtttttttagatttattttaatatatctgcttatttgcagctgctcaccttgcgtggcggtctttgaccgccctcccgttgtttgccacaaattacttttattttataaataaattattttgttacacttttgtttgatttgtgtatatatttgcatatttagccggcaaactctgcattattatcttattgagattttatacctcagcaccctttgctataaacgcttttttgcctaaacaaattatataaaattttattttaacctccaaaatgattaaatcacttttttataattcatgccaaaaataaaccttaaaactataaattttaatcatttgtagtctcagattcatcatatctaaagttaagcgaaaccactgttccaggttctaccatagttccttcaaccggtgattgaccgatacacgttgcatttttacccgattttgaaactcctttgatttttgcgttcaaaccctcgctgactaaagttgaatttgcttccgccggcgtctttcctacaacattcggcaccgcaacagaacgagttgccttattgccctcggtatacaaaacaactgtgcttccctgagtcactctagtgtgcgcttttggtatttggtcaactataaggtcactctcgccgctgaacttaacctcaaggccgctctcatcaattgctatccctgcgtcagacttactcattcctgtaacatcaggaatttcaacatcaacatattcttcctcagaactgttatatttcggctcaacccccaaatactgcaatgtttcgcccagaatatcgcgaactaccggtgccgcaatagtaccgccataatatgaatcgccatttggctcatccaggattacaaggcaaacaacctgagggtcatccgccggagcaaaccctataaatgacgctacatacttactgtttccgcgggggtatttctctgacgtaccggtctttcctgctattctatatcctgctagatacgcatttttacctccgccgactgatacaactgattcaagtatactgcacatttctttacttgtttcttttgaaatcacctgtcttaccatttcaggctcggtgttctcaactattcccatatcggaattaactatttgttttactatatgaggtttcattaatgttccgccgttagcgacagcactgactgcagctaccatttgaagaggcgttactgttatagactgtccgaatgacgatgttgccaaatcaacatctgtcatattgtcttttgtaaatccaagacccgttgcttcaccgggaatctctattccggtcttcttaaagaatccgaatgcctcaacacctgtcaaaaacttttcttttcctgtcttttgaccaatttgtataaaagcagggttacacgagttttgtactgcctgagtaaagttttgcaatccatgaccgttagtattggcgcattttattgctctgtccgcaaccacaaatgaaccgccgcaggtgaacgagtcattcagtgtacatgaaccagtgtctaaagctatcgaagcgacaacagacttaaaagtggaacccggttcataagaatcgactaccgctttgttacgcctaaccgtctgcattacttctcccagcttcgcattatattcctgcccgtctaaattttcaagttcttcttttatacccggatatttttgttcgattgcttctgttatttcaaacggagcattaagattataatccggctctgtacacatagcaagtatttcgcctgtgttaacatccattacaatagccgccgctccctcgttaactttattatctgcggctgcggcttctaaatttttctgaacatagctctgtattgtttcgtcaatagtcaaaacaacactatttccatcctgagcagctatataattctcatatccgttattatcctcaagaccggttgatttttgagccgacactacccttcccggcacaccgctgagttcttcgtcataaatactctcaacaccttcaaggccctgattgtccgtaccgcagaaaccaataacctgcgctgcaaaattattatacggatagtatcgtttaacgtcctctgtgaaagctacaccgctgagtcccgaagcatttacatattctctaagggtgtcggcaaccgtcttatccacttttttctttaaagtctcattttgaatcttttttgatattttatcctttaccgcgtctttttcaagttccaaaatatcggcaaatctctgagcaacctcatcaatagtcatattttttttactgatagatgtacgcagcgtttcaggagttatacttatagtctcaaccgtagtgttggttgcaagcactttatagttcctgtcatatatatttccgcgtttggcgctgaccgtattatcacttgtctgctggtctaaagcctgtcttgacaagtccttccccctaaccgtctgaagccagccgacgcgaaatatcagtgctataaacatcactgaaaatactattaatacagtcataagcctggtaactttcccgcccttttttttacccttatgctctgccatatttattcctccattaattacaacaaggcgaccaaatttaggccgccgttctttgtggaaagtttattatataaaattataaaatagaacatattttaataacttttatacacattttgtatttcattttattttgaagaagaagatttaactacttcatcctttattcccatatctatataaaatatctgagacgaatccggattaaccattcccagttgatttttagcgactgattcaaggtttcccagttcaattgatttatctatacttgactgtattccttcgtttgtgacaagaattttactatattctgaattcaacgtttctatttcctgatttttaccaaatattgcactctgtctgtaaagcatcagcacacacattaaaaatatcactgctatgcctaaaatagataatacacgagcctttaattttcttttattttctaaccgctcctcacgggtcagaatttttctctgaacctcactgcccggaacagtcaccgtggttccgccggtatatcccagcggcctttcataaacggaaactgatgatgtccgcattccgtttgccataggcctttctgacggagccgtatacacaggtggataataccccctcatatatgatttatcctgaatattaacagttgaattacctctccgattcgaactcggtctcttttcctgatatacaccgctttgggctctataagattttctgctctcataactgcctgttcttagtctttctgtacctgcatactgagtgtttctgatttcagtgctgtttattccgggatacctataattcatgttctcctgataacgcggagcaccataagcaccgccatatgatgaagtgcctcttgtttccgcccggtaattcctgctttgcgacaaaggtgcttgtcttctatatgctgtcttttgtttctcaggcactttaccatccctttcaattaaactttttaacattcgattatattttttctgctattcgtaattttgcactatgggctctgttatttttttcaagttcatcttttccggcaactattggttttctgtttattatctttatcttcggcgagtttccgcaaacacaaaccggaaattctttcgggcaggtacatcctctggccaattctgcaaaagcagtctttacaattctatcctccagcgaatgaaaggttatcacagccaaacgtccgcccggcttcaaacattctataaaatcacaaattgcttctttcagaccatcaagttcatgattgacctctattctaatagcctgaaaacttctcttggcaggatgcttgtccccatacctttttttcggaggaaatgacctctttataatttcacttagctcccgcgttgtttctattgtctttctttctctttctttcactatattagcggctatttttgaggcattcttttcctctccaaacctgaacagcaattgtttcagttcatcaaaagtataattgttaacaacatcatatgccgtcagtttgtcgtccctgttcattctcatatcaagccgtgcatcggaattatagctgaatccgcgttctgcctcatcaagctgcggagatgacacgcccaaatctagaattgctccatcaatattagggattttaagactttctaaaatattttttacattaaaaaaattatcgtgaacagttaatttcctgcacttatatttttcaagttttttaccggctgcattaagtgcggcagtatctcggtcaataccgataagagttccggattcgccaagtttttcacatataagagacgaatgtccgccgccgccaagcgtgccgtcaagatacactccttcaggctttacgttcagcgcttcaacgctttcattcaacaaaactgaaatatgattaaatttcatagaagcttcctctgcgttcaaatttctatataaaatcttcctgctccataattgactctatattttcggccttataagcgtcgtcgtcaaaatactccgaccacttatccctattccatatctcaacatgcttgaacgcacctataaccgctatttctttctgaagaccaatatattcacgaagactgaccggaacaactatccttccctgcgtatcaagttcacactcgcttgaaccggcagagaaaaacctaagttttttcatatctttcaaactttccaaaaaccgtatccattcatctttcggatatatcgaaatacagttgattcctttagcgacgacaaaagtctgacccaaatcggttctaaacttagatggaatgttaaccctgaacttagcgtccacagtttgcatatattcacctattaacattttgccgcctcctttcaaccaactttttttggttttagggcaatgtgctccacacttaagtcatttcgtaccactttcatggcatatcaatacactttagtacactttcccccaccacgtatattctactacaagcccttgctttatgcaagcgttttttataataattttaacgattttgaaaagtggacaatataatcgtattttgtcgaaaagagaggtttataatcaaatcaaaaccggaatatatagtgcactgagccaatatattatacaatatatacgagttgcctaagtgacaaaattttcgtgtttcccttaaatactatggtcaaaacatttatttacaaatattaccatacagtattatacatacattcggccaatatttatggagaatcatgaagaatgctgtttacaatttagtaaaacttatattacaaaacaataattctatcgcactatacaagagaggtaatgcttatgatgaactacatatggggcggaatgataataatatcacttatagtatcggtatttaccggacgggttgagcagaccgcggcggcggctgtcagcggagccggagacgctgtcactctttgcatttcacttttaggtataatgtgtctatggacaggtatatctaaaataggtgaagaaggcggcttaataaaaattatagccaaagccttaaatccaatattaaaatttatatttccaaaacttgacccaaaatcaagcgcgttcggaagcgtggttatgaatgtggtagcaaacctgctcggaatgggcaacgcggcaactcccttaggaatcaaagctgtaggagaactggataagcttaacaaatgcaaaaaatccgccactgatgaaatgtgtatgtttgtggtattaaacacagcctctttgcagctgataccaactaccctaatatcacttcgtcaaagctatggctcggcaaacccaggcgaggtcattctgcctatttggatatgtgaattatgtgcgctggctgttggaatcactgtcgccaaactatttcagacgcatcaaaaagacagggggcataaactatggaaatagtatctatgtactcagtcccattttttatatttatttttctgatttttggatttgtaaaaaaggttgatatctatgattgctttgtatccggagccaaaatggggcttgaatccacatttaacatagttccgtcacttataggacttatggtggcaatagctatgttccgtgaaagcggatgtcttgaactaatcaccaacgcaatctctcctgttaccaacctgatacatatgccgccggaagtagttccgcttagttttttaagaccgatttccggcagtgcggcgctggctacggtaactgatatatttgaacacctgggacctgactctatgcagggcaaaatagcgtcaataatgatgggctctactgaaaccactttttatacaatagctgtatactttggaagcgttggaataaaaaatatacgctacacgttatttgccgcgctaagtgcggatttgtgcggaatggttatgtcagtcctgctcgcacagattttttaagtatgaaacttctgaaatcaaccatataataaaaccagcgaatacttgacttatttaggaaaaaatagtaaaatacttggtattatattattaattggtttaggagattttgtaatgaataaaaatgagcagcttgccgaacttcttttcggcggtattgataaaacacctgaatattatgaagaaaaatatcccaaacgtagccttccggaaggcgcgccggtcacgcgtataggcccaagccccacaggatttgtgcatttaggtaatctatacaacgcaataataggagagagactcgctcatcaaaacggcggcacgttctttctcagaattgaggatacagacgccaaacgcgaggttgaaggcgcagttgagctggttatatcagctatggacttttttggtattcactttgacgagggcgcctctgtcgacggtgataatggagcttatggaccataccgccagcgtttaagaaaagaagtttatcaatgctacgccaaagagctggtaaagaaggggctggcgtatccttgtttctgttcggaggacgacctttcaaaaatgcgcgaggaacagattgcggacaagctcaatttcggatattacggtaaatgggcaaagtgccgtgacctttctatagatgatattaagaaacggattgaaaacggcgataaatatgttctgagatttaagtcaaacggagacgaaaataaccacgttgaagtatatgacgggattcgaggaatgctgaacgtttctgaaaactatcaggattttgttctgctcaaatccgatggtataccaacttatcatttcgctcatgttatagacgatcatttaatgagaacaacccatgtggtaagaggcgaggaatggctttcaactctgccgatacacgttcagttatttgacgccttaggctttgacagacctatatactgccacacagcggttctgatgaaaatggacggtgacacaaaaagaaaactttcaaagagaaaagaccctgagcttggtctcgaatattaccgcagtgaaggatatgcaccgagagctgtttgggaatatctcatgactgttttaaattccaattttgaagagtggagattagaaaatcccgacgccccgattgatgactttaaatttagtttagacaaaatgagcaattcgggagcgctgtttgatattatgaaattcgaggatgtcagccgcgaggttcttctaagaacaccggcaaataagatttatgacgaattttctgattggctcaaagaatatgaccctgaattttataagctgtttacccgagacaaaaattattccgaaaaaatcattgacgttggcagaaacggaaacagaccgagaaaagacctgacaagctggaaacaggcacgcgatttcttctcattctacttccctgaaacgtttaaagttgaagatgaatttcctgaaagggtatctaaggaagaccgatataaaattctaaaacaatatttaacctcgtttaatataaaagacgacaattccgaatggtttcaaaaaatcagagatattaccgaatcaatgggttatgccgtgaaaccaaaagatttcaaaaaaaatcccgatatgtataagggcagcgtcagcgacgtcagcggagttatacgtgtagctataacaggacgcactaactcgcccgacctttgggagatatgtcaaataatcggcgaagacgaaatgacaagaaggattaatttggctattgcaggttaaaatataaactacaaaagattctgtttttatatagaaggagaaaaaacatgggtaaaaacaatcaaaataatgagcagtacagacctaaaaaaataagtgtatttgacctccctagaccatcatttcccaaaagggcagttgtgacaggaggtatgccttacggcaacaaaaagcttcattttggacatgtaggcggcgtatttgttcaggcagactgttttgcgcgttttctgcgcgaccgtattggagaagagaacgttatatttgtttcaggtactgactgttacggctcacctattgtcgaaagttacagaaaactttgcgaaacaggggaattcgacggaagcattgaggattttgtcagaataaaccatgaaagtcagaaagaagttcttggcaaatatgatataagcttaaatctctttgccgcttcaggacttggagagtccaaagatgtacatgctgccgtaagcagtgaattaatgcagcaatggtacgaaaacggacatctcgagaaaatggtaacctctcaattctatgacgctaaagcaggacaatttttaaacggcagacaggtcataggaaaatgtcctgttgataaatgccagagcgacaaagcatatgcagacgagtgttcgctggggcaccaatatatgccggctgacctgattgaccccaaaagcacattaacaggcgaaactcctgaaatgcgtgacgttgtgaattggtacattgacataacaaagtttaatgaactgatgaacgaatatgttgacagccttcctgaaaaaggcaattcacggccgcttgtatacaacacaataaaagaatttatgcttcctccgatgatttacattaaaaaagactttatagacgaatacactgcaatcaagtcacaaatgccggagcatattctgaatttggaggacaacaagacctcattttctatcgaatttaaaaatttgaatgaccgtgacaaagcaaaagaactgttaaacgataataacatacggttccgcgccggcaaaactttggttccgttccgccttacaggcaacatcgaatggggcgttccagctcctgtactggatggcgaagatgggctgacaatttgggtatggcccgaatcattatgggcgccgatttcgtttacaaagacatatttaaaacagcagggaaaacccgaagatgaatgggaaaaatattggaaaagcacggattctgaagtgttccagttcattggtcaggacaatatatatttttacggaatagctgaaatggcaatgttcatagcgcttcaaggcaaggaaaatctgacagcattcccgtctgacggacagtatacgctccccacgcttgttgccaacaaccatattttgtttcttaacaaaaaagcaagcagcagcggagatattaagcctccaatggctgaggatttgctggagtattatactgcggaacagctgagagcgcattttttaggtttaggactaagcttaaaaagcgttagcttccagccgaaacctctgaacccgtcagccggcgaaaaagacgctgaccctgtagagcgcgaaggcaaaatgttatccaatgtgtttaacagagtagcgcgctcatgcttttataccattcaaaaatacggagaaccaattatgcctatgggtcaggtttccgaagaagtgctgcacgctgcaaaagagaccatactaaaatatgaacacgctatgtataagtttgagtttcacacagttatgaatctgatggacacctatataagagacgcaaacaagttttgggcaaaaaacattaaagacgcggaagctgatacggaaaagagaaaccaagtgctgatagataccttgcatatggtaaaaaccgctatggtgctaatgcaccctgtcgctccggaaggtactgaactgctctgcgaatatttaggatttggcaaagacatatggaactgggagcatgtttttgacacccttacagatttagcaaaagctaacggcgaaacagaacacagattaaaatttcttgagccgagatttgatttctttcccatgaaagcgagataaaaacaaaaatctaaattagcattttataaaatacacaataaaacaaaaactgattcctcaattaaaaggaatcagttttgttatttatatttatttttatcacagtacatttcgaataatccataatttttgtacggaaaatcattttttaatttctttcaaaaatgcttctgttctgcttaaagcctcatttatattttttattgaataagcatatgaacacctaataaagccttctccgctctcgccaaatgcagtgcccggcactacagcgagtctcttgctgtataataagttttcgcagaaagtatttgaatccatacctgtgctcttaatgcatgggaaacaataaaacgcgcccttcggctcaaaacagctaagccctagcttgttaaaacctgcgactataacctgtctgcggtaattatattcatccctcatcgtttctatgtcactgtcaccgttttttaacgcctctattgcggcatactgagcggttgtaggcgcagacattatcgcatactgatgaacctttgtcatagcttttatcaaggccggatgacctaccgcgtatccaagccgccaacctgtcatagcatacgcttttgaaaaaccgctgacaacaacagttctgtcatacataccgtcaatttcagcaatagatacatgtcttttatcaccatatgtaagttcagcatatatttcatctgataagaccattatatctgttcctcttaaaacgtcagctattccttcaaggtcttccttagtcataacagctccggttgggttgtttggaaacggaagcacaacggccctggttctgtctgttatagccgattttagctcctcaggcgtcaatctaaaatcattctctgcctttgtctctataaccaccggtatccctccggctaatgatactataggcttgtagcacacaaaactaggttcacataccaaaatttcatcacccggctcaactatagaacgtataaaaaggtcgatagcctcacttccgccgacagtaaccacaacctggtcatcaggattataattcaaagaaaatctgcgtttcatatagttgcagatttcaaccctaagttcttttaatcctgaatttgaagtataatgcgtatgtcccttttccagagaataaattccctcgtccctaatatgccacggagtgacaaagtcaggctctccaactcctaaagatatgcagtcctccatctcggccgcaacgtcaaaaaaacgtcttataccggacggcggcatactgcttaccgttttatttatcattttttcaggattaaaactcatagggatattacctccctttcatccttctccggctgcgagcatactataccgtcaaatttatagcgttttaagacaaaatgagtggcggttccaactacagattccataggagccaaatgctgcgacacaaaaagcgaaatttcttttatattagaaccttcaacagtaattccaaaatcataacttccgctcataaggttgacggatttaacctcaggatattggtatattctctcagctattctatcaaaaccctggtttctctgcggagtaacgcgaagctctatataagcggtaacagaatccgggcctgccgctttatcccaatttattttagcgccataacctaaaatagtaccgtctttttctaaatcgtcgatgatggcggcgacttcttgtgcggcgattccggtcattaccgaaatctcttctaagggcagtctgcagtcgttgtgcagtatttcaagtattttatcctggtttgaataattagacataagtcatacctccatcaataaatttatataatgataacacttttagtattaaaggtcaagtaatattcaggttttgtaatcaaaataaaaagaccgcctaagcttaggcggtcatgttttattaatctaagaaataaatatttactgcgcgtcttccaaactcattacactgagccttagaccagtagaataaatctactctcttgccttttatagctccgccgcagtctcctgcaatggcgtaaccataaatatattttccatcagcagactcaatatacatctttgttccgtaaggaataaccgtcgggtcaactgcgattacaccatatcccataggcatacctgttgatgtaacgccggcccaaggaccgttgtcttcataagacgcgtcatatgctgtcgctgtaaatgtttctactcttgaataatttgtaggtctagaagcaggtatttttccaacttcaaattcttcctgcggtgaatattcaactatctcatttaccggctctgctaatacaatttcaccgattctttctcttgatatctcagcgccgtcctgataataaatcttatatgtgatttctctttctccgtcagagccttctcttgtaacaactctctgacccggagctaaattcacattttcaacttcttctgtttgatacgagattctttcagatactgttactatctggctctcttcctggtttacaatgatttcgtcaccggcttcaataacatctgtcattcttggtgtgacctcatcatcggaagcctcaacgccaacatcagcaagaacatctgaaacaagcttttttgttgtgctatactcgttagtaacaccgtttatagtaactctaaccggtatagctctgttaatctgaattactgaattatttgaaaccgcatcatttaaagcaacatttgtttcgtcgccctcattaagtgatataccttgctttgctaaaactttaccaacgctggtatcacttgtttttaccgtaatcggagtattgtctccgtcacaaatcgtaacggtactcggagttgcatatgcaaaactacagcatgttgccacaataaaagttgaacataaagcagctgctgcacaatttttggctgataagtgtaactttctcatcagtcttgtaaacatcgaatcacctcaaataaatttttggaataaaacaatattccttatctctgtcacgctggctattatatattgacttagaaaatccgtcaaaccttcaaaattgtctcaaatcgtctaagtcaagtttaaatccagcaccggcacaaaatcaaatgttttctcttatattctaataattttagcttttttcttttatttgctcttcttttttcctgacgattgccaattttggttattgtgctcaatccacttttctgttatactatttttatggcattatatcaggaaattatagcgaaaaaactcattttttgcattgtaacacaaatgtaacagagttgtaatattaagaaatattttaagataaagctttcgtaaacaccgaatttgcgttgattttattttgttatatttctgaaacaaactactcttttgtttattttgcacaatgaaaatcaatttttattatacagtttgcacatgttaacattttatgaacataaacgcgcaaatatgaacattctatgaactcaaaaaaggaattaaaatacaatgaataacactttattaaacaaaaacgaaagaattgacgaccttcatttaaataatttaaaactgatacagaatccaaatcagttttgttttggcgtggacgcagtattgctggcacatttcgcctcaaaaggaataaaatccggttccagaacaatggatatgtgtgccggtaacggtataatttcaatactattatctcacaaatctgccgcagaagaaataatcggcctggaaattcaaaaagatgtatcagatatggcatcacgctctgtaatcctaaataatttatctaaaaaaattaatatggtctgcggagacttaaagtttgccagcgacatatttggaaaaagttctttcaataatatagtctgcaatcctccatacaaagaatatggcggagggcttataagtaaacacaattctgcagcgattgccaggcacgagatactgtgtaatgctgaggatattataaaaagctcatctgaactgctaatgcccggcggaaagcttgctatgatacatcgtcctgaacgattgatagaccttgttacacttatgcggaaatataaaattgaacctaaacgactcagatttgtacatccttcttataaaaaaactgccacaatgatacttttagaaggaacctactgcggaaggccaaaacttgtcctagagcctccattatatatatatgaagaaacaggcgcaaaatataccgatgaaattaatttaatatatgaaagaaccgccgaattaaaagataaaagcgaaggagaaagttatgaaaggtaaattatatttatgtccgaccccaatcggaaatcttgacgatataacactgagaactattaaaacacttgaatccgtagatttgattgcggctgaagacacaagggtcagtatgaagttattgaatcatttgggaataaaaaagccaataaccagctattatgaacataacaaaaaagaaaaaggcgcccatttaattgaaaaacttttagacggatgtaatatagctgtggtcacagacgccggaatgcccggaatctcagacccaggagaggatatcgttatgctttgcgtacaaaatgaaatcaaagtagaagctctgccaggtccatgcgccttttccactgcacttgtggcttccggacttccaacaggacggtttacttttgaaggatttttgtcggtaaacaaaaaaagccgcagagatcacctcctcagtttaaagaacgaaacgagaactatgatattctatgaagcgccgcataaactcaaagcgacccttgccgatatgcttgaaacattcggaggagaacgtcaaataaccgccgcgagggaaataacaaaaaaatatgaggaatatataagaactactttagaaggcgcagttgaacattttgaaaacaatcctcccaaaggtgagtttgttctaataataaaaggcgctgaccctgaggaaataaaagaaaaacaccgggcagatttgcccgatgctgaaacggttatacttaaactgataaatgacggcatgaaaggaaaagaactctcccacactgcctctgagatattagggatttcaaaaaatgaagcctatagcctatatctaaaaattaaggcagagcaataaccgccacctgccgtccggttttttctttatgcacacgatatgaataatatttatccgaattgcatattgtgcactcatccgatatataaatatttataggttctaacccttctgaaaccaaattatctctattaacggaccacaaatcaacatgaaacttactattcggctttgaaacacaatatttttcgtcaaacaatgaagcggtatcacggtccacctcaaaacagcacttgcctatactcggtccgatagcggcaattatatctttagggtctgagccaaatttttccttcattaaacgcacagtcttaccgccgatttgtttaacagttccccgccaaccggcatgtgaagccgcaacaacttgtttaatcgggtcataaaaaagcaaagggacgcaatcggctgaaaatattattaaagcaatacctctttggtttgttatcagaccgtctgtgtcacgaatatcgctctcctgctgaaaaattccctttccacagtcattttcagtaacaatacgtatattatccgtgtgcatctgtcttgcgcaaactccacggcgtatatcaaaacctaagtcttcagcaagcagtctatagttttctaaaaccgaatcagaatcgtcgcctactctgaatccaaaatttaaaccgctgatttttccgctgctaaccccaccaagcctgcgtgaaaatccatttataacacccagcttttcaaaaggctccgccacaagatagctccgttcatccttttccaaaactttaaattcactgttcattcaaacacctcaaattctgctgaacctaagtctttcaatatctacgacactttttgtcttattatctatctcaaaaacacaaccgttaaaccatacgtctccgttttcttctttttcaaaacgataatgctttcctgcattatagtaataatttaaaataatttctttcttaacccctaaaatagagtccattataccggtcatccctaaatctgaaatatatccggtcccgccgggcaaaatatgttcatctgccgtctgaacatgtgtatgagtgccaaaaacaacttgaactttaccgtccaaaaaattgcccatagccaaacgctcacttgttgtctctgcatgcatatcaacaactataatatcactctcaatccgctttaagagattctctacagctctgaaaggacagtttgcaggagacatatttactctgccgataagattgataaccgcaacttttgcgtaccccaaatcctgtattatatatccgctcccttcaaattccggcggatagttcagaggacgaatcagcctgggattttcttcaagcgcctgtgctgctgatttagtaccgaaggtgtgattccccatggttatcacatcggccccggcattaaccagctcatcagctataataggcgttataccgtttgttgcagctgaattctctccgtttgcaataacaaaatctatattatatttgcttcggattcttcccaaattctgataaacatactctcttccgggttttccaactatatctcctatggcaagtattctcataaatatttctcctcaaaacaaatctactaatttctgcgctgtctcaatgcttcatacattaaaattccggcagccacagacgcgtttaacgattcaatctctcctatcataggaatcttaaccaaaaaatcgcacgactctcttactattctgctcataccgcttccctcgctgcctatgactattccaagcgggcctttaaggtcgcattcataatgattctgagccgcagaaaggtcagtcccaacaatccacaagcctttctttttcagcttatccaatgtctgagaaatatttgacacttttgccacataagtatattctactgctcctgcgctcactttcgccacagttgagttaagagcaacgcttctgttcttgggtattataactccgtgggcgcctgcagcgttagcagttcttattatgctgcccaaattatgagggtcgctcagcccctcgcatataactataaaaggggattctccacgttcttccgcacgttttaaaatttcttcaacactcacataatcgtgaaaagcagtcactgccaccaccccctggtgattagcgccgtcagtcattttatccagcttttgcttagcggtaaattgatagcggacaccttgctctttcgctatatttctgatttttccaattacgggatggtttaacttttcctgtatatacagcctgtctattgtacgaccggattcaagagcttcaataaccgggtttcgtccataaattttatcattttgacttacgtaatcttcattattcataatattcttcctatatgtatttttatattttttataaactaaggtttaactgaataatattcaacaccagggtccaaagtccatcctttagcccttatcatttcttcaacagtaacaatctgatatcctctttccaacaaatctggaaccatccacgaaacagcttccttagtacaatcaagcaggtcatgcatcaatattatgtcgccgtcggtgacattattcataaccgtccaataaattgtccctgaatttaggtttgaccaatccaaagtgtccaaagaccattttattatcggctgacctatagccgacctcaccatatcatttgtttcaccatgaggagggcgaaccattttcaaatcgtctcctaaaacaattttagcatcgagattagtcatatttatttcattaaccacctgatcccacgaacattttggaaggtgaggatgataatatgtatggtttcccagtcccatcccaagctcctgagctcttttcaaggtctgagggtactgccatatcatatttcctaccacaaaaaacgtagcctttgaattatatgtctccaaaatatccaatatagaatcggttaccggagaataaggtccgtcatcaaaagttaaacacaccataggttttgaaggatcaattgttctttccggctgaagaccaaatgctttttcaacggcatccggtgaaacataagccctgtcgttataaacaacaacctctcgttcaagcggaaaatattcaccgtctctatatataagacggctccttaacttcataacagcaacctgcccgtctttttcaacagttaaagtgtcctccggatacttatattcaattgttgcacccacttcgccaaaagcatctgttgcaagctcaagctggctgtcatcaacatatgcgtatacggatatggtatatgtaccgcaaattattaatattccaatgagaagaaacaaatttaaacaaaatcttttcaaaacaaattcacattcctttataacaaattttcaaccaaacaatcgtactcctgaatacaaatatatgtctttgacccacattcaaaatgttaattgaaaccgcaataaaaaataaatataatctataactttaacggctggttaacattatcatttaattatactcagtaaatccatttctcattagacttttagtatagcataaaagttcctgaatttcaataaacaagaaaaaatactaattaaaaaacgaccattttggcaattatgtatatatttttattatttatattatagtaattataaatatataaaacataaaatagcgccgcctaaaaataaggcggcgccatgctttttaaaaaatttatttggaattgattattccatacagtccaaagagcatctttgatgcttcagcccttgtagccgaattcttcggattgaagtatccattatcatcacccctggctatacctgtgctgtacagataagacacagcgccttcagcatagtcgcttatttggtctgaatccgggaactcgtgcatctcagctgcaggtgaaccttgagttctgaatattataacggcaatatcttctcgcgtaatattctgtccaacgccaaatgtgccgtcatcacggcctgtaattattccatgttcaacagccgccgcaatataaggtgtataccagtctccgttagcgtcgctgaattctgtggttgcgttctgatcaacctggtatcccataacaccaacaatcatctttgcaaactgttcacgggtaacaggcgcgcttggttcaaacaatccatcgcccattccgtttacaatacccatattataaagagccatgattgactgttctgcccagcttactgaacctaagtcggtaaacacagaattatttcctggagccggggtaggtgtagcgggatcttttataacagggttataagtatttccgcctgttccgccactaccgcttccgctgccgtttgaatatccaaaattagctacaacggacattgtaccgcctgaaatataatttgatagagctgactgcttaattgtaacggtgtttcctgaaactgttactgtttttccatttattttaaaactagaaagtgaatatccattctgagtatttatcttaaatgtaatagaacttgagccgtcgttatatatttcgtcaaatgtatctgtagtctttgagctaaaaccatttactgttcctgaaacaagtcctgatatagtgagctttccgccttttccaacagtaactgtcatgtcaaaatagtcgacatcctcaccgcccatagaatcagataattctttaagctcagctgagacatcatcaaggtcttcctgtgaataaataacatcactcatagtgctctttgtgggatttttgtcatcaatttcttctttaagcgcattataatttgattttaaatcggacaaatatgccttagctgatgtaataagttttttcatatctgatatatcactggaattataatcagaagaattattaatatatgtcttagtataactatttatgtcggcagtaacagtgtcatactgatcaactgcgtcctcgtaaagctcgctcgctgacatttcctctactgttgaataaaccgtaatatcagatgccggcatagtaatcgtcttagagaatgagttgctgtcattacttattaaagaagtcttattctctttagaatctacataataagcgtctgtatatttatatcctctgtcagcgtttcctttaattattacttttgagccggaagccgctgctgaaggtgatggaactattgttgacttttctgtcttattaacgtttatgctatactttccattcggcttagccgttgaagtcggcgccggagttgagcttgaattcgaagctgtagcagtagcggtaggaaccgggctttctgatgaatcaggagcctcagaagcttcaggcgagcttgttggatctgctgaatcaggagttgctgaaggttctgctgttgctgttgcctccgggtctgttgtatccgctgccgtaacgatatcagaatttgtaccgtctataacgtccgcaaaagatactattggcacaattgatataatcatgcataaagccactgctaacgctatgtcttttaaatgtctcatgttttttcctccattataaaataaaattctattatgttttaccacatatgccgtcacaagtcaagaaaaatcggcaaatgttatgtaaaagaaacaaaggtaatttatggtccgtcaaattgtatatttttattattaattatgttttatattttatctggactttatattttgcctttaagttcttaacactttataatatgactctgtttaatactattttgttcctggatttttattaaaattttataaaataattataaactggaatttataaagttgttttttggttgtgcacgcaagcgtgcgatgtggattcacctcacgcgttcgctccgctcacctgccgatgttcattgacttttattttttatttgggtttttatgttttataaatttgtttttgggctgtgcacgcaagcgtgcgatgtggattcacctcacgtgttcgctccgctcacctgccgatgttcattgatttttattttttatttgggtttttatgttttataaatttgtttttgggttgtgcacgcaagcgtgcggtgggattcaccgcacgtgttcgctttgctcacctaccgttgttcattgcttacttcattttattatttctttttattttttaaattaatattctttgttcattttgttgattttgccgacttattattttttgttttataaatctgtttttatatattgtataattacacatatcttttacctcaattagtttctgactattcaatctatattacttctttatgacgcggagtttaaccaagatatcttaaaattatatgttatctgtcaaacaccgtttttaaaattgtatgctataaaaacttataaaagttttaaacatatagtagtcatataaaatgcactgttcaaaatatcaatatcaatttttaaaaatgttttttgattgcgtctttatgcacataacttcttaatttaaaatataattatggtatagttattttttcacttttaactaaaataaaaaccggcggacatttttgtccgccgatttttaattcaaggagtgtaaatacaaataaatttgtgtagttgttaaattagtttatacctcaaccttttttccgcagtcaaatttatcatctttatagtctattgtgactgcgtctccgggtttaatctttccttcaagcatgctttccgcaaccatatcttctatatcggactggatagcacgtcttaaaggtcttgctccataattatcgtcaaaaccattctcagaaatcttttcaacagcgctttcagtaaactctgccgttattccattatcccttagcctgttgcctaatgattccagcattttaactgcaatttctttaatattagacttagtaagcttatggaaaacaataatctcgtctaccctatttaaaaattcaggcttaaatgcttgctttagttctccgagcacatcctctttaatttgtgcgtaatccctctcgctctcggcatcgtcgtccatagcagaaaatcccagctgctttgttcctccgccggttattagacgggctccgaggtttgaagtcattatgataatagtatttctgaaatctacccttcttccctggctgtccgtcaatataccgtcttccaaaatttggagcagaatgttgaatacatccggatgagctttttctatttcatcaaacagtattactgaatatggctttgttctcaccttatcggtaagctgtcctccctcgtcaaatccaacgtatcccggaggcgaacccaccatcttggaaacagagtgcttttccatatactcggacatatcaactcttataatagaatcctcatctccgaacatggcctcagcaagcgcttttgagagttccgttttaccaacaccggtcggccctaagaatataaatgaaccaatcggcctcttcgggtctttaagacccacacgccctcttcttatagcttttgccacagctttaaccgcctcgtcctgaccgacaactctgctgtgcagtatttcctccaaccggagaagtctctcgctttcgctttcctcaagtgtttttaccgggatacctgtccagagtgaaataatctctgctatctcattttcagtaacttctgaatctgagttcacattatcctttgaccagttttctttagtctcatgcagcttttcacgcaaagatttttcatcatccctgagtttcgctgccctttcgtattcctgggtagttatagcggcctctttctcagctttcaccgcttctattttctcctcgatctcacgcacgtcaggcggcgctgtcatatttttcagcttaagcctggacgctgcctcatcaatgaggtcaatagccttatcaggaagaaatctgtccgaaatatatctaatcgaaagatttacagccgcttcgagagctttgtcagatatcttcactctgtgatgcgcctcatacttatccctgattcctttcaaaatctcgagggtctcttcaggtgtaggctcgtcaagagttattggctgaaaacgtctctcaagcgccgcgtctttctcaatatattttctgtattcgccaagggtcgtggctccaacaatttgtatttctcctcttgaaagcgccggctttagaatatttgcggcatctattgctccctctgccgcacccgctccaattatcgtatgaagctcgtcaatgaataaaattatctttcctgacttgcgtatctcatccattgccttcttgagcctttcctcaaactcaccgcggtactttgctccggcaagcattgacgacatttcaagagttattactcttttatcttttaatatctcaggaacttcgccatttgctattttttgagcaagcccctcagcaaccgcagtttttcctactcccggctcaccaattaaacaaggattattctttgaacgcctgctcagtatctgtataacacgctcaatagctttatctctaccaattatcgggtcaagctttccttcacgcgccatctgcgtcaagtctctcccaaacttcatcaaagtaggacagtcgctcttctgactgcggcctgactgtttttccgaattatctccggttccatactgcccataacctccgtactgcgaaccgtttccaattgcctcgccgtcatcgtcgcttagcatatttaaaacatccgaatatagtttctgagggtttgccccgagtgaaatcagtatctttgctgcgatactgctggtttccctaagcaatgctatgagaagatgttctgttcccacataattatgtcccagtcttctggcttccactgcactgcgctgaacaacatattttgttcttggagtaaagctgttcggcatttccttaacagactcgcctgttccgagcatctcgcgtatagcttcagtaacattttcttcatttatatcattggactctaaaatctttgcggcaacaccgtcgccttcttttataagccctaaaagcatatgttctgtcccaacatagttgtgtcccagttccattgcgctctcagccgccaaatttatagcgttctgcgcgctttctgtaaatctgttctcaaacataattaacacatcctttctttaattatctcaccgcgtttaagatcgcgggaaaattcatttgcagtgttatagttctttattatatttgccggaagtatcgaataggtaatttcatttaatgtctcatattttacatcctttataatttccagagaaactcccaagcgaatgtctgataaacgtttcatagcctcatccgaactcattataacagcgtttttaagtattccgtatgaacgcattattctatcttctaatttatatttgtcatttttatacaaaagccgtctaagctcacgctcatttgaaactacttcagaaacaatttggtttaacctttcggttatatcctcctctaaaactcccaaagtaagctgattggatatttggaatatattccctaaaccttttgagccttcgccgaatataccgcggacggttagccccagctgtgaaagcgacgccgcaagctcgttaaacttccctgtaagcacatatcccggcaaatgcaccataactgacgctctcaagcctgttccggcattcgtaggacagcaggtcagatatccaaaatccttatcaaacgcatagtcaaggctttcttcaatatgatcgtcaattttattggcagtgtcaaaacatttatcaatctcaaatcccggctccatacactggattctcaggtggtcttcctcatttatcattatacttacccggctgtcaccgctcagtatcaaaccacgcctcttatcattatttatcatctggggacttataaggtggcattccgctatggcttgtttttcataatcctccattttagagaggtcaataaactttaaatcaagctcttcaagcgtcttatcgcctttgtcgataagcgcgcccctgcatttatcaagaacttcctcctgctgtttttcattggcggcaagagggaacggaactccgtccaaattgcgagccagtcttactctcgacgacagtacaacatctccgtcttttccaaattcattataccacattacttattcatcccctttcagctttcttatttcatcacgcagttcagcggcccgttcaaactcttgtctcaaaaccgctgaatcaagctggcttttcagcttttcaagctttttggatgttttcaaagaacctccggccctttccggtatctttccaacatgttcataagttccgtgaatctgttttaatgggcgcagcagcctgtcatgaaacgttttatagcactctccgcagccaagctttccgtttgaagcaaacatctcataagtcataccgcataccgggcatttattcaccgcctgcaatatttcaggttcagcagccccgggcatatgccctcctgtcaaactataaagagcagaagtcaaatttcctaatcctacgctgtcataaagtgaaccatgtcccggaataatactgtccgcaatctgctttgaacagtcgcggcatactttaagcctgcttttctttccgtttatattacagtatatatcctgaacggcctcattttttccgcaaatttggcatttcataaatatcattcctttctttttctgattcaggcggcgctaatcagcatatttttaagaatccttgctctgatttcatcctgaaccggctgtttaagcggcaaagacttttcattcagtgcgcttataattatctttgcctctcttccgtctattaagtcatagtcaaaacaattttttaccattgcatatgcgtcagcatatgttatcctgtctcctatagaatttatcacatgcatcaatttcgcacttttgtctccgcaggcaacgggagtaattctgatatatccgcccccgcctcttctgctttcaaccaaatatcctctctcaggcgaaaacctcgttgtaatgacataattgatttgtgacggcacacagctgaatttttctgcaagcgcattacgtttcagctctatctctcctccattcgcttctctaagcatttcgttaataaaatcctctattatattactgagcttcatttcttaaccacttcccttatcaactttccagtataacaatttgactttgactttctttgacctttgttttatattatagcacgatttttttatttgtcaatagttttttgcaaaaaagtcaaaaaatttttcatcttataaaactacagtttttcggcgtttttcgtagcactctttatcttttttaaaacaaaggtcaaaaaatagtaaaatgcggcggcaagtatataatatactattatgctaaataaagacatctttagtcccggtacataactaagacctgataactgacccgcagttcctcttattaatcttaaaaacggccttattataataagggacaataacccgctgagcggaggataaatacagtaaattaaaaagttaataaacccaaccacaaatactatcatggttgacggtatcactattatatttccaacaattgagccaattgaaattctttcgaaataatacgccaaaataggcataacccctatctgacatgcaaacggcagcaaaaacgcgtcaagcagccaggatatactcttaactatattattctttaaaactttggtatttttaacaaacctcttaaacacagtcaattcagaaatcttttctgacgctttttccgctccggctttcgaaatagcagtcaaaggtcttgcaaaaatcaacaatgacagagtagcgctgaatgacaaaataaaacttaggttaaacacaacatatggattgaccgcaactaataccagtgccgcggtaaataaagacgtcacagggtccgggtctttcataagcaggtacgaaaacaaaaatatggacatcataataacagctctgtttacagagggcgtaaatgcggccaccgaagcaaataatataagcactggaactgtaaccgctattcttattttcttgctgaaagccgaaagaagcactcctaaaagagcgcacaaaaatgaaacatgaagtccagacacagcggctatatgcataaatccggactttgacatatccgagtataagttttcagaaaagtcatttttgtcgccaattaatattcctttaagcagtccgctttcttcactgcccgctaatatataatcagcatattctgatacttttccgcgaatcattataccaataccgcagaatttgtcccacatagtttcttttggccggtattcactgaaactgttggcatatacggacatataacaaccctgactaagcaattgcctgcgataataaaaatcacccaacttttcctcaggtctgctgagttcagctttaaagcttattcccattccatacctgacattgctgccgctgggcagatatactttaaacttgctcttaggattctcaagcgtcttgccgtctcctgatatgtattccactctgacagtcataccaacactcttgccgctggagcttaaagcaggctcagatattactttggcatacacctgcgagtacacatggtcaaaatcattcagcttattatataaaaccattttatatgctgcaggataacctatccctgcgcctattgccgatagaatacatacggctgcaatcagtctgtttaataaatccggcttcatcctaagactgcggtcgaaaaccgatattactataaacaaaacagctgcggataataaaactaaaacagaaattattacagcggttctccctccatttatctcatcaaaacctcccgttatcgaaagaacaagcgcaaacaaaaagaagaccgcaaaacacacgagataccgcaccctaaagaatgaaaactttacgattttgccggtcatgtatttcacagccttccatatttattaccgttttacttttctgcgtcctttggagacgtcttagacggtctgtcaaagactttttcatccacagagctaaccgcctgggtcatttcttttgtatcctgataatccattatatcaatcaatatacttctgcaaagagcagtgataggtaccgccaggaaaattccaactacaccgaacagcccgccgcccaaaaggataccgaatattacccagaacggttttatctgcagtgaacctgacaaaagctttggctgtatcaggttagaatcaagctgctgcagaattatcatcgaaacaacagctacaatagccagtgttaaagaccctgtaaacactgttataacacctgtcaggaccgttgccgtaatagctccgaaatacggtatcagattaaacgcgccaagcataagagccaaaagcggcgcatacttaactccttcaacagatagaataataaatgaagcaataaatatgattatcgcatccacaagcatacaataaatatacttattcgcaaactcattaattctgctgagatatttaaccaagaaatttctagtcttctctctaaaaagcaatttaccgaatctaaacatgctctgtttaagattagttctgtcaattaatatataaactgatataattattcccataaacaccttaaacagtcctgaaccggcgtttataacgccctgagcgtatttgttcacattatcaaaattcaggtatgacagcatcttctgaaatgagaaaaactcattgtcaaatatctgctgtattgtgccgtctccaatagtaactcccaaattcagagaattaaaccagtttacaaaatcgccaatcagcgacggcaggttattataaaaatccataaggttgctgactacagcaggtataatcgcaacaagcgaaagtacaattactgccacaaacactatatatatagtagaaacagcaatcgctctgcgatgtttaaccaaaaacggcgtggagcgctttgccagcagattttcaataaaccggcagggcacaagcagaacataagctataacaaacccaataataaacggatataaaagcgttattacctcatgaaagaagtctaatattcttccgaaattatcaaatgttttgtaaaccgcgataaccgccactgcaaacacaaataaactgaggtatttagtaagctctttccacttcataatgtttacctccttttcttcatatatttatatacaagttctttctaaaaacaaaatacaaatcttatacaacctaccgaattataccatatcataacaaattagtaaatactttcttatgtaaaatattcgactatatggtaattttatcctaactacagatttattaaaaataataaaagaaatttaaacttttttatatttttttcagaaaaacatttgaatttaatagaatagtatgctatacttttactaggttgtggaaaaagcgcgtaaaaacgctgctaacatagccgtttaactttgaaaaaaattaatttttagttatatccaaggaggaaaaacaaaatggctaagtttaagactatggatggtaactgcgctgccgcacacgttgcatacgcgtttacggaagttgcagcaatctatcctatcactccttcttcaccaatggctgagtacgttgatgaatggagtgcaaagggccaaaagaatatttttggcgaaacagtggaaatggtagaaatgcagtctgaggcaggtgcggcaggtgctgttcacggcgctttgcaggcaggtgctctcacaagtacattcacggcttcacagggcttgctccttatgattcctaacatgtataagattgctggtgaattactgccgacagttttccatgtaagcgccagagctctagcggctcatgctcttaacattttcggcgaccatcaggacgttatggcttgccgccagacaggtttcgcaatgctcgcttctggaagcgttcaggaagttatggatttgggcggtgttgctcacctggcttcaataaaaggaagagttcctttccttcatttctttgatggtttcagaacttctcatgaaattcagaaaatcgaggttatggaatacgaagacctcaaaaagttggttgactgggacgctattaaagcgtttaaggataacgctcttaaccctgagcaccctgttctcagaggtacagctcagaacggcgatatctacttccagggaagagaagctgctaataaatattacgacgctatccctgatatcgtaaacgaatacatggttgaaatctctaaaattacaggcagagattacaaacctttcaattactatggagaccctgaggcaacaaaggttatcgttgctatgggaagtgtctgcggcgccgctgaggaaactgttgactacttaaggtcaaagggcgagaaagtcggagttttggaagttcatttgtacagacctttctctgctaaatatttcttcaatgttatgcctaagacagttaaaaagatagctgttcttgacagaacaaaagagcccggttcattgggcgaacctctttacctcgatatctgcaatctttataaggactgcgctgacgctcctaagattgtaggcggacgtttcggtcttggttcaaaggatacaactccaactcaaatcgttgctgtattcaagaatctcgacgaagacgaaccaaaaacaaacttcacaatcggtattgttgacgacgttacaaatctttcactgccgctcaccgagacagttaactgctcgcctgaaggcacaacacgctgtaagttctggggattcggaagcgatggtactgttggagctaataaggacgcaatcaagattatcggtgataacactgacctttatgctcaggcatattttgattatgactcaaagaaatcaggcggtgtaaccatgtctcacttgagattcggtaaaacccctattaaatctacatatctgcttgatgaagctgactatatcgcatgtcataagccggcttatatacaccagtatgaccttctcgaaggactaaagaagggcggaacattcctgcttaactgcgtatggtctgacgaagagctggacgaaaaactcccggctagcatcaagagatacattgctgagaacaatattaacttctacacaatcaacgctgttgacgtagctgtaaaggttggtctcggacctacaagaatcaacatggtaactcagggcgctttctttaagctggcagacgttattccgtttgatgaagctgttggatatattaaagcggctatcaagaagacatacggcaagaagggcgacgaaatcgttaagatgaactgtgacgctgttgatggagctatcgacgctcttcacaaagttgacgttcctgcttcttggaaagacgctgttgacgagcctgtatgtgactgcggcaagcctgagtttattacaaaggttgttgagcctgttaacgcacagcgcggaaacaagcttcctgtcagcacatttgttggtatcgaagacggtacttttgaaaccggtacatcacgctatgagaagcgcggagttgccgttttagttcctgagtgggacgtttcaaaatgtatccagtgtaaccagtgttctgcttcatgtcctcatgctgcaattcgtcctatccttttgacagatgaagaagctgcaaacgcacctgagagctttgctacaaagccggctatgggaccggaacttaaaggtctccagtacagaatgcaggttgctcctcttgactgtctgggctgcggagtttgtgcaaacgtttgtcctgaaaaggtacaggcaatcacaatgaagcctatcgacgaagttgccgatacagaagaaggaaattgggaatacgctatgacggttccgaacaaggctaaccttgttgatacaaagaagagtattaaaaactcacagttcgctatgccataccttgagttctcaggcgcatgtgcaggctgtggtgaaacaccatatatcaagctcatcactcagttgtttggtgacagaatgatgattgcgaatgcaacaggatgtacttctatttggggcggttctgctccttcaatgccttactgcaaagacgaatgcggcagaggtccggcttgggcaaactcactgttcgaggacaatgctgaatttggtcttggtatggttgttgccaacaagaaggttagagagacattggtaagccgcatgaattcagttatggatgacgttgacgctaaacttgctgacgcattcaaggcttggattgccggaaaagatgacgctgacgcatcaaaggctgcagcagaagatattaaggctcttatcaaagacgctgacatgtcaaatcccgctatcaaagaaatcgctgacagaactgactacttagttaagcgttcacagtgggtattcggcggagacggctgggcttacgatattggttacggcggacttgaccacgtaatcgcttcaaacgaagacatcaacatctttgttgttgacacagaggtttactcaaacacaggaggtcaggcttcaaaggctacacctaccgctgctattgctaagtttgcagctgccggcaagagagttaagaagaaagaccttggtatgatagctacaacttacggttatgtatatgttgctcagatagctttgggttcaaacatgcagcaggcattgacagcaatcaaagaagctgaagcatatccgggaccatcacttattattgcttacgcaccatgtatcaaccatggtattaaggcaagaggcggaatgggcaactcaatcgctgaggagaagaaggctgtagagtgcggatactggcacttatggagatttaatcctcaggcgccggaaggcacaaatccgttcacacttgattcaaaggctccgcagggcggaatcaaagacttcatgaagggtgagaacagatacttgcaattgctgaaagcattcccggatgaggctgaaggattatttgacaaagctgaaaaagacttaacagagagatatgagacatatttaagaaagtcaaaagaagattacgctgaataatcatatatagaaaaagagcggtgattttttcaccgctcttttttatttctttgaataatatatttaatgtagtttaaaatgtagttaaaaaaatagtagccataaaagcaacataactatcctctcgcccaagacagttatataaataacataattaacttgtgtgacaaacgtttgacggttatcttttgtctgtttttattatatgttgtttttctttatatatcaaggtcattttttatatttcctgtttctttcccgttgactttgtgaaccaccgtaaaaaaagatttttcaagtttctattgatttaacttatcaaaaaactaagtttttagcttttataatacataaaaaagtagggttttcagcgaacatcggtaggcttgtgttaacaagcacgttaggtgagctaccatctgaacacgcagtgttcaatatacaattttcttattaaacttataaaattttcttgcatatgacactctataatcttttattattttacttaactaaaaaaactatttatataccttgtatatgaccccatataaaaaaatttattattacataatagggtgtttgaaccatttctttttctcgcaagaaaaagaaacgcttcaccaaagaaaaagtgcttgctcgcttaggtcgcctgcggctccaatgggcgctcgcccccgctaatttcatcttgaatctgcgtttcaagatgaaaaagccttgtaactttcccgttgactttgtgaactgccgtgaaaatagatatttcgagttcctatttatttaatttttcaaaaaactaagttttcagcttttttaatacataaaaaagtaggtttttcagtgaacatcggtagggcgcatttatgcgccgcgttaggtgagctatcatctgaacacgtagtgttcaatatataatttactttgtatatgacaccatataaaaaattattagttttataatacttttattttagaaattatcgtgtagcagaagatacttcttaaactttatctgctaaacaaatatggtttttaatatttctatgatataattataccattcagtgaacatcgttaggcttgatgtgactgcacctataggttgcgtatgagacaaattaatttgttttttaggagtgtatactatgaaaaaagaagtaggttttgaaaacagagaccgatttgttgagttaggattgatgatttcagctttaagaaaagctaaaggctatactcaatatgaacttgctgagaaagctcatattagccgctcccatcttagctccattgaagctcctaatatatcttcctcattttctttagaagtattcttcaatattgccgatattttggaggttaaacccggtgatttacttaatcttaaccttccatcgtcctattttattgaagatgaaaaagagaaaagataataaaattaataaacgtatattataattttgttatatttaaattattaaggaagtggtaaaatgtatttaaaaagattaaggtccctgcgtataaaagcaggattaaaacaaacagatattgctgaaatattaggaatacaacaaactgtatactctcgttacgaacgaggttttcaaactataccattaaattttctaataaaacttgcagacttttataatacatctaccgattacatattaaatcttacaaatgaaataaatccacattaagtaataatatttacaaatatattgaacactacgtgttcagatgatagctcacctaatgcggcgcataaatgcgccctaccgatgctcgctgaccctcagctttttagtgaattaaattaataggaactcgaaacatcttttgtcacggcagttcacaaagtcaacgggaaagttacaaggcttttttcatcatgaagccgtgcttcatggtgaaatgagcgggggcgagcgccccttggagccgcaggcgacctaagcgagcagcactttttctttggtgaagcgtttctttttcttgcgagaaaaagaaatggttcaaacacctattataagtaaaataataattattatatggggtcatatacatagtatataaatagtttttttagttaagtaaaataataaaaaattatatagtgtcatatgtaagaaaattttataatttaaataatatagttgtatattgaacactgcgtgttcagatggtagctcacctaacgcgcttgttaacacaagcctaccgatgttcactaaaaaaaccgcttttttgatataataattaaatggttcaaacaccctattatgtaataataaaattttttatatggggtcatatacaaagtatatatataagtttttaaaagtctaatagtaatatataatagcactgcaatataaaataaccgcaacttaactagagttgtggttatttatttatatattaaatcaaagtaataaaaaatcataaataaagcggtattcctaataagcccgtcaggctaaagaaaataccgctttaaaattattttatctctttcactgatgttatatcaacattttcaggcgtgaacttcttctccattacactcaccagcgctcccactgtgtcaagcgacgtcataagactgattgaactctccgacgcacagcgccttatcttaaacccgtcgcttcccttgtcgttgcccttctgcggtatgtctattatcaaatcgcatatcccgctgcggattacatccaaaacgttgggaactccctcccctatcttcttggcaaccttaacaccgattccattctcctctaaaaacttggccgtgccctctgtggcaataaatccacatcccaattcagcaaaacgtttggctaaaggcaaaaagttctctttgtctctctccctcaccgtcgccagtatggttcccgacttttcagatatcgttgttccggcaccaataaatcccttgtatatcgcttcctcaaaggttctgccaactcccaaaacctctccggtggaacgcatctcaggacccaggctcacctcaaccataggcagtttctcagtcgagaataccggcacctttacagctaccatgcttgattcgggatttatgccggttccgtatcccatgtctttgagcgtctctcccaacatcaccctggttgccaattcgattaccggcactcccgttaccttggttatataaggaaccgtacggctggaacgcgggtttacttctattatatataactcgtccttaaactcgataaactgtatgtttatcatgcctataacttttaaagcgacagaaatttccttggtaacctccataatcttctgcttcatcttgtcagttatgttttgcggcggataaatcgaaatactgtctcccgaatgtattccagcacgctccaaatgctccattattcccggaataaacacatctgttccgtcgcaaatagcgtctacttccagctcgcgtccgcccaaatacctgtcaataagcacgggattatcggaatccttcttgaacgcgtcctccaaatattgaacaagctctgtctcgttatgcgtaatctccataccctgaccgcccaaaacatacgacggacgaactagaagaggatatcccaaatcattcgcttcctctatccccttttgaacagaccaaaccgctctgcctttaggacgcttaatattaagctcctccagaatagcgtcaaacttctccctgtcctccgcctcgtctatctgcttgggttttgttccgaaaataggaacattcatctcatcaaggaagttagccagtttaattgcggtctgtccgccaaactgcaatataactccatcaggcttctcaagctcaattatgctgtacacgtcctcttctgtcagcggctcaaagtaaagtttatctgaggtgtcaaaatcggtgctgaccgtttcggggttattatttataataatagtttcaagccccagctttttaagtgcctgaatactatgaacactgcaatagtcaaattctattccctgaccaatgcggataggtcctgaacccagcaccagcacttttctcctgtcggaaggctctgcctcgttaacctcgtcataagttgaatagtaatatggcgaaacagcctcaaactcacctgcacaggtgtcaaccatcttataaaccggacgaatattatacttttctctgagctttctgacatctttgcccatgcagccgattatctcggctattccctcatcggcaaagcccataactttatattctctaagcttttcaggcgtcagagtttctatgctgtattcttttagttcttcctctttttctactatcttcttaatcttctttatgaaccacgggtccataccggtaatttcgcaaattttctccattagataatcacgtctgataagctctgccaaatcaaaaagcctttcgtcatcaggcacaacaactctccgtttaagcccctccaagctatgctgcttagaaaattcacgcattagtgtgaactgctttatctcaagagaacgaacgcctttcagcagtgcggcttcaaagctgttacctatggccatgacctcgcctgtcgccatcatcttagttccaagctgtcttttcgcgctgaagaacttatcaaacggccattttggtatctttacaacgcaatagtcaagcgccggctcaaagcaggcgtatgttttgcctgtgaccgcatttttaatttcatccaaattatatcccaaagcaatctttgcaccgattttggcaatcggatatcctgtagcctttgacgcaagcgccgaagaacggctgacgcgcggatttatctcaataaccgcatactcaaagctatcagggttcagagcgaactgaacattacatccgcccttaatctctatggaattaattatatctatggctgcttttctgagcatctggtattctttatccgccaaggtctgtgccggggcaacgactatactgtcgccggtatgtacaccgacggggtccacattctccatggagcagaccgttatacaatttccggcgccgtctctgataacctcaaactcgatttctttccagcctcttatacacttttcaatcaaaacctgtccaacgcgcgacaaatgtattccctgagtggctatctctataagctcgctctcattttcagcgattccgccgcctgttcctcccaaagtataagcaggtctcacaataaccggataacctatttcgttggcaaaatcctgggcgtcttcaaccgtattcacaatctcacccttaatcatgggctgatttgtccgttccatcatctgcttaaaactgtcacggtcttcaccctcttttatggattctattgaagttccgataaccctaacgccatatttttcgagcactccgctgtcatataattcacaggccaaattcaaaccggtctgtccgcccattccagcaataaggctgtccgggcgctccttttcaataaccttttccacatattccgctgtaaggggctcaatataggtatagtcagctgtatccttatccgtcattattgtggccggattactgtttactaaaacgacttctattccctcttcttttattgcctggcaggcctgtgtcccggaataatcaaattcggcggcctgtcctataacaataggaccggagccaataacaagcactttttttatactattatccttaggcatttattcttcctcctaacacatattgaaaccggtatattgaattctcgcaattgtatttcaccaataaaccggaatttttgtcaatataaatctatataaatatttaaataaaacgttttttatataagttttcaaagcaattctataaaaatactaatccgataagaaatagtcaaatatccatccggtgtcaagcggacccggtgaagcttcaggatgaaactgtacgctgcgtatcggcaaagttttgtgttttataccttcgcatgttccgtcattaacgtttatatatgactccacaacatcgtcgggcaggtcagaaacgatatagttatgattctgagaggttatatacaccttgcctgtttccaaatttttaaccgggtggtttccgccatgatgaccaaattttaatttagcagtttttcctcccagcgccagtcctattatttggtgacccatacaaattccgcatacacgatactttccgataaggtttttaacagtctcaacagtttcaggtacgtcctgagggtctcccggtccgtttgagataaacaccatgtcaggatctattttctcaatttctgccgccgtaacattatatggaaacactgttatatcacagtcacgttctttaaagtcccgtataataccggcttttgcacccatatcaataaaggccacctttttgccgccgccttttatattatatacacttttagttgacacacggcttataacatcactattatcaaggctttcaagacaagtttcaatttctttatctgatatattttccttgatagttattatgcccttcatacagccattgtttctgattatcctggtcaatgctctggtatcgattccttctatcccaactatatgattttgccgcaagaaaccgtctaggtccatttcggtcctgaaattgctgggataatcacatttttcacgaactacaaacgctgaaagcgcaggcttgtccgattccatatcctcgaaatttattccgtaatttccaatcaagggataagtcataacaacgatttgaccgcaaaacgacgggtccgtcagtgtttcctgatatcccgtcatatttgtagtgaatacgacctctcccacgacatcatgaatatgcccgaaagcttttcctgtaaatctgtcaccgttctccagtattaactgggcaactctgctgttttgcataaaatcagctcctttttattaacaaatgtgcaaaataaaaggacaaatgagaaataaaactaaatctcaatgtccatattaacaatatttaaaaaataagagtccctcataaaatgtgaaacgaaaaacattaaacctaaaaaccaatctttaaagttaactattaactttggtcttacagtcatcaggccgttcccctttctgagcaattctcctattttgcatttttactatcttaccactattactttttcttgtcaatagtaatttttagaaaattttattttttaaaatcttcaagcatgaataacgtttctaatctaaaatataaaaacttttttacaccggtatacttgcttttatattaccaacaatgtaaaattttcataacacggctgtaaataacggaaatacccaattattccgcaatagattagtacaagtaatatatttaactaaattagtatgctggaacgtcagcaaaaaactagaataaaatttaattgtgtttttttgtaaacatcggtaagtgtgagcacacttttttaagtgtgttaaataggtataatgaattagacaaaaatattatggttatttataataaaaaattataaaaatatagtatagaaagcattggatatgtaactgtgaccacactttaaagagtgtattatacaaagtaacttgtttttgtaaattaaaaatagataaaaatttaagggtgtatcttggtaaacatcagtaggtgtgacccgacctgtaaaggttggtatgatacaaggtaatttgttttattatagccttcaacgtcaattgtggctacacttttattaaaagtgtatgttatgcaaaccatataacgtcatatatacttttaatgccaataattagcttagttgtcatacaataaattgcttagttgtgatgtattgtgtgcgtaaacacacctcgttaggtgaactgccatatcacgcgaagcgtgaacatacttaaaacagtttgccataatcctttttaataataaacttttccgtgactgcgcgccttacgcggcaaacgtagtttgtacatcacaactaagtttgattattgacattgtaggtttatcaatacaaagtaatttgtattacacacactttaaaaaagtgtggtcacagccctgccgaagcttgctatatcacatttttatccaactttattgtagtctttccattatggcttacacaaacttgcaaagtgtaattacattcataccgcccgatgcttgcataccacatttgttattaatacccttaacatttctgtccacttcattgcagcctttccacaaactgttaccacaccttaacaatgtttactaaaaacactgtatttagattaataattctaaaataaatttttttacttgatatatacatgaatcatagattattcataatcttagtttatgctaacgacatacctgacaaaagcgacagtataagtctagaaatttctacaacattcattgctgaaataaccggatgtgcaggaggtaatattttgctgtcaaaaactattggtatatctgataaagaaatatttttcttcgaggcaaaatcattcgcgttatttataatcgcattaaatttcttatctgaaccaagaatacgatactttgatacctgtttaagcgctgatactgcatatgcagtatctctgaccctcttgataaaattggtttcataagaactggaaacagaaccgtctgttcttttttatatatactttcaatccacattttaacaataatcatagtcattaactgacgttttaacgtgcttataggcatatcatattatatcacagcaagccacctttaatcagtcaaatatcagtctaatcagtcaaatatcagtcaaataattttctaaaaaaacgtgtaaattataatttacttttcatcccttttaactctatccttaggcacataacctaacttttgaatatcagaaataaacttatttatatctacctcgccatttattataaagttaatcaggctaatagaagatggaaacctcttcccactttcaatatctgcatattgtcttaatgacatacagcatttttcagccatctttccctgactaatattaaattccattcttttaaaatacagtatattactaaaacacattttcaaaatgtcaacaggttccataattccacaccctctgataaaatatacaaacattttatcaatttatcgcataaacacatatgtgattagtctcacatttttgttttataataaacattttgatttagaattatgttataataacttattttatattactatagtaatatttacatcagttaaaaatatacaaaatacacccttattttttgtgcagtattttcaaaataaaacattgacgttgcacgcattgcgtgttataatatagacataccaaaagaaaggaggtaaaaaattgtgggatataattgaaaaggtagccaaaatcttagcttcaatcctcgctggaatttatagcatgctaaagattattgactacctcgaaaagaaaaagtaatactttttcaaaaggatttgggagctaaggctccctcatccttactaaattttatcacacaaaaacaacatggtcaagttttttaaaaataatttacaaagtatttttactgttattttaatgatattatttatttctgatactaattttaaaaatattaaaattatagactatattattataattatctcagcaataacactaacattaactattatagagatgattataaaaaacaagaaataataattcattaaaagacaaaaaaggagtgattataataaatataaaggagactcgaaaaaaagtagggctatcacaagtagaagctgaaaaatatattggcgttcctcatcgcacatggcaagattgggagcttgggaaaagaactcctcctgactatgtcgaacgtttaataattgaaaaattgctaagatacaaagaaagcaaagataaaaagtagacaaaaaatcaagctttaaaatgtgaaaaatagagcggagctattaaaagcctcgccctatttttcacttaattactctccgtaaacaccagctctatcattgactataaacattcgtattaggtcttctgtaagacctaacttgccttcctcatcaccttttaaaaatcccttgtcaactaacttagtaattgttggtcttgcccattcaggcatattttcgtccacgtaatcataaatcattggattttccactttttctaatctttcatttaattcttcatattctctgctcatcagtttgtcctcgctttccaatttataatctactccaaaatagttgcagatacctttataaattcccactgcacatttatattttccgtcgtcgctggctaaaaacctgttgtcgtcataattgtctataaatgcagtctctaccagtatagctggcatgttcgtgtgttttataaccgcaaaattagcagatttgacacccctgttatatctttctgtttccgctgtcatatgcggctgtacacattctgctaacgcccttccctgtgtgctgcctgtgcaataatatgtctcacagccatacgcttttgtgtttgctgcattacagtgtattgaaacaaatatatctgcattccagtcattggcaccattatatctgtatgcaagactgccgtttaaactgcttgataccgtatcggtaatactatcacggctcatctttacagtttgtccactgttaatcagcatatctctaagtaatactccaatttgcacagacacatcttgttcttttaacccaaatcctacagctcccgtatccgctccgctgcagttatgtcccgggtctatgtatatctttgccattattttaatcctcactttcaatctgttggacaacaaaattttccaatctttcatacacatcaaaataagtttcgtttttatttccgttgtgtgtaatttcataatatattccgtctggcacagtcgtggaagccaatgctttataattttgtagagttttacaactccacactacataaacatcatcttctgtaattattttgttgtcagttttgtttacatttttattatagtaactaactattgttgattttattagtttaaaaaaatttttttctgtcattttattgctccttttcattttgtttttttaaaaatttatctgcatttatggcgttttgtgtaaaactattattcttccaccatgctgcagcagacgcaccaattgtaaataataggctgaccgtctgatatatatcatcgtctgcaatattaagcacctgcttaccgcacatagccaatacttgatttgctagtgctaatattaatactatggttcttgctattgttcctgccgttatgttattcttcatgcttttttgcctccttattttaataaatttgtgattgcgaatcctacaaatccgcttacagtcgccgttattagtgctgttataataaccgtgagaatctgtgaaggtcgtccggctataacgtctattttttctttaacatcagaaatatcttctttgagatatttagtttcaacagctaaagatttcactgattgggtcagctcttcaatgttgtctatcctatgatgagcagacttgacggaggattcaaccgccgtcagccgctctctaattgccgcttcgttttcgtccatacgttatacccccttagacgttatccaaaatttttttatacttgtttctgttggagcggttaactccggattatttaacagctgtatgttaaatccattttcgtaactaatccccgtagttatatctgtctcatatgtccctattattggatttgggtcattggaatttctcacgtttaattggagatgtatgttgctattattgaccgtaatattaacctcaatcaatgcgttggatactcccatatcgcctaaatctatagagcttgatactataatatttccgctggtatccttatataaatacttataatatctaacactgctgttcatatttagcctgagtgcaaacaaatcgttgttgtcattatcacatatggttatgaccctatccagctgattcacaatactgtaactaacacttcctgttaataagtgtattgtataaggcttgttgtgtggcaatattggattatccaattttaccgtttcggtgccgcttaatttaagtaccccatatttgttgtagccgctgtctgctgtatttgcgaatccgctcaacattaggttattgcctagaccgcttgtatccattataacttccggcacaactgcgcctgacgcacctgtcgtcttaacattacaataatagtcacaattaatagcgcatggtacagtcttagttatctctgtaccgctaagggtgccgtcaagatttttcacaacgttactcaaacttgtgtcaattaatgtaacagtattattcgctatgctaacaccatctacaccagcccaattcacactacctatggagttttcaggtacaagagcaatatctaaattatctgatgggctgtcattgcttaatactacaagattattaccaacagtaaaatctgttgctgtaacagcaatattggttgtactaaaattaactgtgtcagtatattcaatattatttttagtccctttaacagtaaattcatcaactctgttaacaaaatttactcggtcaaattcccacacacagtctaaagatgaagcagcggtcagcgtttgaattaggttcccgttttgatataattttaatgtatcacaattagaatataccttaattttaatactgtcagtagcacgctggttaaatctgcgtgatgttatatatactgttggtacatcactaaaatatgatttataaagataaaatgcgtcttttttcacagttctgtctcttgtgacaagacctttatcattaatgtatggtaatccaccctcattacgacctgacacagcaaaatcaaataaacaccaggcagtggtgaaaattagtccaggcttttggtcgatttgcgataaataactttcatgaaataaattttgatactcctcatcgtgccgcattccgcccgacccggtgttggtggttgtttcgggcgtttcgctgtgcgaatcagtatttgcgcctgcaccgtactcacaaatacacaaattaggataactgttatggtattcattaaccattgttgtaaagtctgtaaagttgccaccgtaccaacccttatatatattaagtcctatccaatcaagaaacgaccagtcggctattttagaacgaacatatttaaaggtggggtcatgcgctacaattccaataaggtgctgatttgacagcgttttagagtagtcatataactctcttgtcttaatcagtgcgttgtcgtagtcatattccccctgctggttagttccgcttaaatgagagccgcccaattcatttgacattcccaaaaatacgatagacgggtgattatagtaattaataatcatctctttcatattattttttatattgtcgaaatacttgtctgtagcatttaagccgtaatgattcacccacggtatctcagtctgcacaattatccccaattcatcgcagcgctgatatatgtatttgctgtgtggataatgcgccaatctgagcatatttgcccctgattcaacaacaatttccaaatccttatctatcaattcctttgtggcagcacttccagcattttcgtaatcctggtgcattgcgaatccacgtaaaagatactgtttgccattaagtttgaagccattttccttatctaactcataatatctaagacccagcttgtgactgcatgtatcaataatactgtcatttacttttaatgaaacattgacagtatacagataaggattatttaacccgtcccataaggtgggattctgtatagttatacttttggcggcgttataacttgatttgccgtctatagatatattttcggtttcgctatgtacgacagttccgtttgtatcttttatttcgtataccagagcaccgccggatatattaagactgttgttcttgatattcgtctcaaccaatacctttgcgctgctttctgacacttccgactgtgttatgtgcagtcggtctataccatatttttctgtgtcaaaatatacatttgcgcaattgacaaaatacaccatgtcatataagccgttgttaaaattaaaatccccggaaataggagctaagtcccaatcaaggctattatcacatacaacagatatattattgtcgccaacgctgagataatttgaaatgtcaaaaataaacggcgtgtaaccgccgtagtgagttggcagtgcgtgaccgtttaccgtgacagtacatttctgcccggctttggaaaaacataaatatgaggaattattgacctgtgccgctgtgaggttaagactccttgtatatgtcgccgtacctctgtaatagcttgcgcttttgccgtccaccgcattacaggtatgcggcagactgacaactgacacctctgctgctgtagatttttgaaattgccatgtgacaagaggtgttatttgtgttacttgaggtactgcatttattttttcttcaagagctgccaatagctcatgaatctttgtgcttgaatatgtggtatcggttccgactgcgctatcgtcaatgctagttatatcttttccgtctgctccgtctttaccatttattccattaactccgtctttaccgtttgcgccgtccttgccgtttattccgtctttaccgggctgaccttttaagctttccagccattcatcaacagttccgctaaagccgttttctacagctaattcatacgctgactttccatttttcccggttcctccgcctcctccgctgtcaagtttatctaatatttgctcatagacagtttgtgtcggttcaggcggtgtttcaccctcagtatatccacttttgattactgggaccctgattgtgcttgtcgttatccgcattccgttattagtcccatataccgataatgtaaagccggggtgatgtattacttcatacggcacaactacaatattatcatcatctaacaggacgttatagctgttttcattatatgtgaaaatgactgttttctttgttctcttccactcatcagaaaaattaaaacggacagccaaatactttatgctgtccgccactattaagtttcttccggtcctgcgtaaaatttgtccatcgaccttataatccattatcataattattcattctccaacgccttgattttttctgcctgctgttctgtcaatactccgagtgatatataacgcataagctgactgtcggttacataccctttagcatatctagtcttaatcttctcatacatttccttcaccccctcccaatagttggagttcaaggtctgttatatattgaccttgttcaatcaattcaagctctaaatctgtttgagcctgacccaatgttttaatttcatttaatagattcgcattgttaagccgtgacttttccaagagatattttgtatactctgtttctcccatttcataagcctgtataacctcagcgtctgtcacaaactcttttccttccagccacagactttcggacacatcaacaggcactatctcagcagataactcgctgatttgctgatgtaactcaagggattgattagcctcttcctcgtctaagtggtagaactcatgttttattccatcattatcagttacaaccgttttatatttgcaaatataacaaataccattaattaatctatactccattttctatacctcatttcctcagatatgtaacatttacatttggtaagttcgagcctgttactatatcctcaaatgtttcctctacattatcaatatatatatttgttaagtttccgcacacagaaaaagcattggcggcaagcgatgtacaaccgtttgggataaacactgttttaagattatgacttgcccaaaatgcttgattactaataacccttactttaggcatgatgattgctgtcattccagaattatcgtcaatagagcgtgtagctacagtctctaagttaggggcgtatacaatacctttaagcggattatccgggttattgctgtccgaatattgataagatgtagtttccgtatcatgtataacagtaatagtgttacccatcatttcaagcagcggcactatatttaacccggtattagcaagcatttgtataagcattataagactattattttgttccgatatttcggtttgtaatagacttttgtcattatcactcttattatacaattcgttcactgcctcaacagcattagtcttatttgcggtatataagcggctaagtctgcctacatcattgagataatattcatcatcagtattatcatatctgactattttataatttctgaattgcagactttcgctttcgctattacttccttcacagatttgtacagcgttttgggctgaactttctgttaaatatccaatagcaattgatttgctggctccggcggttgcgccatgtccaatcgcaactacttctttagccccctcagcgcctgaaccgattacaacgccgtactcaccagttgaaccaatgccctctcctattgatatgtttccggtgcctccggcttcagctcctccagctatgaatccgccgtttgtaaccttatccgctttatttgatattgaaggtatcaactcatttattactgcaacgatattcgttttagttattgtagcaaggtctgataaatttcctatcttttgttctacattggataaattagacattgtagcaattggagaaaaattactccaatttaccggaacgcccagcacacctaaacgaattaaaacctgattttcatgaaataaggcttgcattacttttgtttcttgtgtaccttctgccgtattagcagatgatacatcaaaaacaaaaagcgtaaaatcacccttttgcttcatagacggattattccatattcctttataaaaacccgggcttgtttgtgtattaaatacgctttcagtcccgtttaatgttcctatatcttcaatttctgtttttgtattcaagacatcgtcaattttatcaaaattattattaaaatccataatgttataaatgtctgtcagtgatggtttttttaatccatatacttttgttgttgtagccattattaacctcccagcacgttttcttttaatccttgatgtgtaaacttgcttaaatatgcgtgagtatacaaccccaacctttcgtgcgtattatataacaagtcgctgtctataaccatatttagcggtaccattctatctatcattttttcgacttctgcaattttgttttttcggcttaaagataatctaaccgtaaccttgctattttccacatctatatcaaccgtaacgttgcccgttccgacaagcatttcaagcttttccagcagcgttctttcagtgtatggtgtgtcacctaaatatattgattttattctgaatcttctatcgtccagcgtgtccgtctcacgccgagaaatattgagcatatcctcccaacgcctacacccctgttcatcaagagtatcgaaaaaaaagttgtttgtcaatttttcggtttcggattcaataagttcaaattctacatcataagttttacataattctacgaactccgttatatcctgcaaaagctcaggcaaatttttaagtgtatttattttttccatattttattactccgttatatataccgctgacacattttttacatatgtttttatggcattggtatgttgtaaattgtcggtaagctgtatattaagatacagtgtagacgggtcaacagttgccgggaaccctgtaaccgtatgttcagtcccattgtatacgcatgtaaaattttgacgtgtagaaaaatcaattttaaaagtaacattaacccactcacctaaaactttatcattgcctgtatatactttgtctgctccatcacttgatttagaatttccacctattattttaatttctgtttcgttttgttcatatccgcttaatcttccatatgtatatgaatttcctccgtcacttgatttaattgttttatttccgcttaaatcaataaaaaagttacccattcccctattatcattcgattgaaaaaggtcaaaagaaacatttaaataacctgttgcggtcgaaaagtctgacggtttagtatctaaaagtctgactatatcataagaccaaccatttcctttcactccaggaccataacagaattcaacagcattcccactgtctgacggagaatgtgtagcctctgctgatataccttgaattaatgataacggttcccaacctgtagaacagttgctaataattttactgtcagaaacaataaaattgctcgttgttaccgcttcaccgtaagggtatatctttatgtttctaacgtccaaaaccccattgagacctaatattttttgttctaactgtgttatcctaacaacaatgttatcagggtctaaatccccccatgattcatttaactcatcaaaatattctgaaaccgaattttgaaaaccgtctgcaatatcgctccatgtaaaaccgtcttgatactctatatcagcaataacctcaatccccattgttccaaccgctgatacagttgccctatgtcctataggagccattcccacaccgtcaccgctgtttataaccgggtcaattaatgtctgaacactgtcaactaaatcttgaggcggttctctatattcgttatcacagataataataccaacagtaccgccgccgtttggcgtccttatcaatctacagtctcctacaccgttaattgactttataaaccttttataatctgcacggttaccgccgaatgacggatttaaaacagtatcaaaataccgtgaacgaaatttttcggtttcttctgtgtcagtaccgtatgttgcaactcctacaatctttgcattagcaagaccttcaatatcgtttataggtattaagtctcctgttttattgccaatgcttccggttgtttcacacatcatcaaataatagtatagccgtggattatcaccgtcccactttggactttctgacataacaatataatttaactcgctgttttgcagactaaatcttgttccctctgatattttcttgttaaattctcccctaacgatagcatacgtagccgcattaagtgttaagttctttaacattgcgtgtctttttaggtattcaatgcttgcggtatctggaaatgcttctttttctatggcttgcagcataaggtatgttttggcaagttccagccccacaggagaaacagcgtcataaattattgacccttgccttttatcaacattgcttgacaccctttgaagcattcggtttgttatctctccaaaattatattcgcttgtaatcatatttctatcacctcatttatttcgagagtatcagttattttgctttgcaccaaaaaacttacttcatatttaccgctgcctatatgatttattttgaaggtattaacatcagttattctgtcatcttgcaacaatgcttcatgtatacggttttgaagctcaggtataacaaagtcttttctcataccgtacaaagggtctatatcggtgccataatcccaattatatattggataacggtacctttgtgtcgcaagaattaaatatatagactgcttcaatgcttccacaccgtcaattgtcccaataatacacttgttctttaagtctataccatatgtcattgagggatatataacgactttagtatcaactatcttttctcttgggatagaaataacgggtagcattagaccacccccaatacaatatgtctttgtccgccttgcattttaagtaacgctaccttatcccccatttttaagctattatcaatttcaatcgtgtgtgtatgagacgggtttcccccgctggtcgtagtataagtattttttctaaaacttgatggtaatatcaatagttccccataaattggtttttcgtatcctacatcaatctgcaacggttcagtggatacaaccgttccaaatacagcattagccggaacggtttccttaaccgcttgtactgcaacacgctttaccgcccgtgtaaattctgtcatatcaatcatataaactgtcctccaaccaaatgtaaatccataaaatgctcaccgtttttaaaagtatgtttaacgctaaaacactccatccactttttttgaattacatcacctaaattaaattcaatatatacctgtgttcccccccttactgttacatcacctaacgcgccttttatatcaagttttcttattttatttgttgttatttttataatctcatcagcttttttggctccgtcctctccctcgtcaagagtatcacaatattgcaacactccatattttggatattcagcagacttatctctgatgtatacttctcttactcccgtttgctcattatcgtaatataatttaacccttgtgtaagtgccctcgtctatagttgttgtataatcaaaatcttgtgctgtaaagtcacacacaacataatttttcttataccagaatttaggagccagaaccagcgagccaaaattatcccataataaaaaacgatagccgccatgggctaccgtataatctaatgcgtcctcaattatttgaaaaacctgaatattatcacaaactgtaaggggtaatttaacgcctgtgtcctcaagctgaccatatgctattttataatcattacaaatagattttattatttctgtagctgtacagccctcaaacacaaaacagtcactattcttaaaatatctcgtttggtcataagcagttacttttatgtgatgttgcttagtccgttgtttttggaatatgaatccataaaatacaggtgcaccccgatacttaaatataacctggtctccctcctcaaatgatacgtattcatctttgattaccgtaaatgctaattgtgccgggcttccgtatgcttccgtttcccatattatttcatcaactacaacaggcttatatatcgccccttctgcacctactatatatagctctatgttattctgattcagcatctttttgctgttaagagggttttctctaaaatcaacacttgcgcctatatatgacatagtttgtgcggaagttataggaacagatgttgaattgttacattcgccgctgtccgaaccgtcaatcgaatagttaccgcttcgcattttagcgagattatcttgtccctcgctgtcactttcaacaccgcttcccaaatctgcgctcgctacatctccgcctgtcaaattcttatatacagcagatacgcccccataccattgattattggtgccgtatgggtcgttagctgctccaacaggacaatatttttcttgtatctgtttaaaatttaatccttgatgtagataatttcgtgatatattagatatacatttagtcaagccttgctccaagctgtcaaattttgtgaatatcatagagccgcttcctgacatatatccaaagaaattatagttcctttcagcaggtccgtaatcaccgtaagaactttcaaggcatgctatagaagccgcaaatgcagggttaacttgatatgctatacatatttcgcagaataatttcccctgatttgcaagtccgcccttaaatatttcgttcaatttatccgctgtaacaatatcagaccatgtttttaaattcagtgacggcttgctgctgtttaaaccgttaaacggcggcgttacgtaacagtaatcagaaacattgcgtgtgttggaagcaacactatcgctagaattcccctctacactttggaaactcccgtttatagcgtctgttcttactattcctacatgttcattaccattggctcctttttgaccaacataatttctaataaataaatctccagtctttggtgaataactatttcctttagcatgaaatgttccttttccctctttttctgccatatatgcgaaagctgctgccgcaccttgtgttccataatcattaattccagcttcttttaaacaccaagacacaaaatacgcacaccaagggtcaccggtactgtcatattctttatatataccgctattttcggtatatcctatttccttttctgcaatttccactaactgttttgctgtagccaattgcgttcacctcttttttgcacaaaaaagacacccaataaggtgtcttgacaaatattcattttgtgttataataaagctaatgagtgattgggttgaatcggtcactccgctaagttaatacttgtagaagtgccgtcctaccgctaggacggttattttttttaaggataattacagtcaaaagcattatgtaaaatactacaatcacttccgccataatatcaactcccctctttgggaagtcagaataaccgccaatcactcattaactttttttattatatcaaatatattttattctgtaaatttataccatacgaaataaagacacttcttagaaccacaaccacttatcattgaattgttgcagtatctgaattgtatcatatgggcttttatttatcatcgcttcaatttctaattctccaccaggttctttcttttcgattgttacataatttccatctttttttaatacaggagttccttctttatatactacagaataagaattttcatttttcctataaattgataaatcttcatttagataatcaagtgtaaatccacaattaaccaataaattaatataaccatttatgtgattttcatcatacggatagaaatatatataattatcacttactccattattttctataaaatctttatagtctattcctatatacgcaccataatcaggtaaccacgaacatttataaaaatcataataaacaatattatttggctcttcacctgaatattgacttgaggtatttattataacattgttatttcggaaattaacgtcaaatttattcgtagcctgtgctatatcccttaacttgaaataactgtagccgtcaatgttgtaaccctgtatctgctttggttcgccgttaacatatataggataaggattatcatatatatgatttacggcatatgcacctactagactacttataattacaccaatcaataatccgcaaataaattttttcataaaaatacctcccatataaatattataattaatatatcatacggggaaaatattgtcaattatatttattataacgggatatagttttcaggtgtaggacaatcttttccaaaaacaccagcacgggcaaaaatacaaatttgacgtatcatgtcataagttaagcctagctctccgctgttgccgcctttcaaaataccattgtcaataagatattcgacagtccctaaagcatgagatgggaaatttttatctaaataattatataccattcggctttctatttcagacaataattcctcatttttctgcatttcggcaagaacagccttcgctctgtctttggcgttatctatggctgtatatggtgtcttatatttatcaggcacgttcccgcttgtgtaatcctggtctacccaatacgctatagcctccgctatactgtcagctataacattccttgtctcttcgttatataataatctagcgtcatttgcgttatttattcgccctacgtgagccgtaacaccgcacattattttttcattttcgttgataggcaaatatcttgtaagcgttataggtattttatattcgggcatatcagtatttttcacaactgtattaagtatagtatcagccaaactatagctccatgcgttccacgtatcattatcaatacccggtgcatttctattttcataatgacagcttatacctctttctgtactggtctctttattcccggacggttcagagcctatccccaaataaatgtagtaaggtgtctgctctcctccatcgtcccataatttttcgctctcattcagacgtatgcgcaagctctcccacatatcttcacttttcgtagtttcttttgtttctcggcttaaatgagtttcaaaagatgaatatttatgtgagttcataaatgtgtaattatcaagtgtttcagaaactctttttgccacaaaccagttcatgtcttgttcacgcactccataaaatgaagctcctgcattattaccgctgtaatctctcagagggtcaatatacactctgcaaacactcattttaatccccccaacccttttcatcttccggggtagggcaatcgttaccgaaagcgcctgaacgggcaagagccgctaaaattcttagcatatcataggttaatccaagttctccgctatcgtcacctttaagccaccctttaaacatcaaaaagcgaactataggtctaaactcctgcggcatatttttatcaacatagttatatatcatataactactcatggcgtttaacctgttctgatgtcccataacagtctgcataatgctttcatactgcgtcactgtcaatccctcctcagttatcttatttacatcttctgcttgcaacttattgctttcaatattattgttagcgttatattcatctatatttccgaaactatcatcagtaagccgtatagacataccgggaaatatttgaggtggcaatacttccctctttgcacattcagcatctatgttttctttatttattgcgtataaataatcaatcagattttggtctgcccgcccaaattctctcatggctatagtagctaaagtgtcaccgtcttttacatctacaaccctgtttattcgcttatctgtaccccggactaccgtataatgtaatccgtcatcatcttgtacaacggtcgccgttgaatactgccgatactttttaaaatttaactctacttttatgtcctgcccgttttccgcctcttctgttactgtataatcttcgagagttacagtttcatttgtgtaatatgtatcttcaccgctaggcatttctctgtatatatcaagctggaacggcagaagttcactttttagataagagaacaattctaaatagtgtaaaggtggcaaaaaaccgtcctcatagcttgcatatggacggtctgtgcaaggcaattcaatttcaaacgagaactctttcaatccctcttttttaattatgtttatttctccgtcatctgctaattcatatgtttcatttttgttaataatctttgttgtataggttgatggggggactggtaatttagtccccgcaataaaaaaagagtaagccattacgctaacactcccttccaaacgacttgcgcattttcttccataccccttgacaatttcttaatcaacgtgtctgtattttctccattctgcataacaatatcattatcctgtttaatgttaaccggaactttgataattgtattattagtagttttactcgctattgtctcacgcattgcgctaaaatctttttttcctgaataattgcttgataaattagtcttgaggtcaggtattgagttagccgtaaccactgcacccatattaagtgatgtgtttttgatagcgtttatctggtctgcaagtccaagattaaagccctcaaatgtaaagttaccaagttcacgcattacctttgacggcgaatttatattaaagaattgttttatagccccaaccgctttttctcccaactccttaatcttacttgtaacaccgtttattttatccgcaatacctgttataagaccgtctatcatttcatgtcccttttgtaaaaatttatccttcaagccgccaagataattaagtatttccgtaaacttgtctttaacattgttgtatatttcaacaaccttatttcttacaactgagaatatgttgttccagatattagaaacagtgttgaatatactgcttaacacgcccgaaattgcattatatatactgttccatatgctcgacactgcaccccatattgaggacaacacgcctgaaacagcagtatatataatattccatatacttgttataatgttccatatagagattagtacacccgaaacggcgttatatattacgttccacacattacttattacgtggaatataccctgcattatggttgaaattattgtccatatcacagtgaatatcgtgcttattaaattccatatagccataactatcggagaaatagtgttccatattgctccccataatgtagaaacaacagtatacatactgttccaaatactgacaaagaaattttttatcgttgtaaatatcgaaactatgctattccacaaacctgttgcaccggaaacaatcttatcccaaattcctttgaagaaatctgtaacattgccccaagcacttttaacaccttcccaacaagcactcgccgcatcttttatttcgttccaatgttcgacgactaaaactatcccagccactaataaggctataaccgctataatagccaaaacaatccaaatgaccggattggcatatgaagcaatattaaaagcccacatagctacagtcattgcaccaatagcaacagaaagcccaataaaagccgccttaactatatcttgatggtctaatacccacgttatgacgttcataattacatcactgactgtcgccattgcttcggctattttacctatgtattcttccagccttccattatttgcaagttcgtttattttttcaagaactggctgaaatgcttgcatagctctatttttaaaatttgtccacaactggctaaatgttaatggcatactagcaaatttagcgtttgtttcatcagcacactctaatagtgcattttttaccgtttcagctgttatttgtccttctgctgccatatctctgattcgtcctattggcacacccatataattcgctatactttgaatcaatgtgggcgcttgctcaaatatactgcgtagttcatcgcccctaagaactccagatgatagtgcctgtgttaactgcaatgttgcattttttgtttcctccgcactcgcaccggatataacgaattgtttattcacttgttcagcaaaatcaacgatttgtgcagtgttttcaaacgcatcttttgcatttaagccaagtttagacaccaggtcagccgtatcttgatatgaacctctggacttttgggcagaatcaaaaattctatcttgtaattctttagtgctttgaagtccatcattcattaaatcaagccgagcctttgtttgagacatggtatcagataatccgatgatttgttttactcccataacagagcctacagccgccgctacttttcctaacacaccaaccataccattaccagaagaggaactttctttcattgatgttgcaagttgtttaaatttagatataccagtagttgttgcgcttacaattttattttttacgttcgataggcttgtcacaagacctcttaatccttgaatagattgagttgtggctgtagaaaatcttttggttgagtttacagctgaattcatagagcttgaaactctggatatgttagctgatgattgaccaatagtcttaacagcatttccggcagatgttgacgctgtgttcaactttttagcgcccttttctgctccgctcaataccgtttttacatttgttaattcagaacgtgcagcggcaattgactttgtatctacaagatttccaggcatattctgcattctctcaaatccggaaataagaagattcatagcattatacattgatttaataggtgcggtaactttatcctgtatttctattgctgttttcattgtttttcctataataaccaccccctatttctttttactgttctttttattaatcttttttatctcctcctgatttatctcaatacacgccgcaatgaaagcctgttcttttcgggacaaatttaaatattctctaggtaaaaggtggagttcatgcagacagtaataagcatagttactgtctgcgtctccaccttttattagttttttgcttcttttacctcatcttcaaatatttcattaaaaccgtttacatctaataatttgttagaaagggctgtgtactctccgcttgtcaacatgtttcccaaaacatcttccgcacaagaaacgccgtaagcgtcctgtatgtcaatctcgttcaaatccggcttaacaacacattttgccatcatcttctttgtgtataaagcagcatctaaatcaagacttgacacccctcttctgctggaagctttttttatcatacaatcggtttgcagcaattcgctttcttttgccgaaagtgctctaagttcccattctaacggattaccgtcatcatcaacgaatctgttgctcaccacgaattttatattttcaaccttcttaggattcaaaaacccttttaatgttcccatctttttacctcctattattagttgtttctattattgttgttattgttgttgctattattgtttattaaaaatcctgtcaaagcagtaaaagaatgagtaatctcaaagtcctcaaatgtgaagtccatatcctcatcaagatacccgccgtcagcgtcaaattttgctagaataccaccgtctatattacagtctttaagtgttactatttgatacccagcgtctgacgttgggtcaccgttttcaattgtaatgtcaaaatagacatcttttccggtattcttataatcagccatcatttccctaaatattgaagtgttataatgaaatgttgctgaccctgttcctttccagcctgtagatttatttcctttacctgttttaccgagtatcggaatttcttcttttgttttttcaaagttggcttcaaggttaattgcttgcataaagttataacgcttagtgccattagttatggtgcattttcctaagttagcttgcaaactgtccttagctttcatcaccacattatttgctatgttatagtctttttcatccatttattttccctccttacgaaacgtaaacagtcatatatagctgtctcatagcttcaattgttgtaattgtatcagtaacgattacagagccttttttatctcctgcctcgactgtaacatcagaagatgcaaagttttcaattgctcttatatttctcaaatcctcgtgtattttcacaatgtcattttttagtgaggctctgcccatattatcattcggtgatattcccagatatcttgtgttaaaaagaacagctatgtcattagatatttggtctgttacccgtatagtttggttgcgtttaaaatcttccgacttaccatcggttacagttacaagactgttaacatcatcaagcacacgggtttcgtttccaactctatggaacgccaaaaaccccgactgaataaagttagataactccgtttgtgtataattagtgtcaacggtatattccccgtcatattcaacatttgttaaagagccatttacacggcacgccgcttctgctccgcctgtccagtaaactaattcatgcgcagattcagaaccgtcagcgaccttgttaggcactctaatacagccctcataatctgccggaatttcattttctgggtcatgtataacaacctgaaatttaataccgttttcgtctcttaatcgcttcacatagtttacatacaatctcttatctgttgtctgtgtcaatgtgcaaataagaatattaaacgaataagattctaacgaatccaaagccttttgtattgtggctcctgacgaggttcccttagtaccaccggataaagaactcccagatgttacggttggtacaacattctttttaaaatcaacataatcattatcaacaagtccgttgttttctgtgcttgctgatgtaattttttctatttgctgaacatcaacaaccgtactgttataaattgtcaaaacattaagacggttttcatcatctaccgattcttcaatttttattttatattgatttccagcttcgcccggatatttagctgtagcatatgtatttgttgcttttttgccgccttcgcagatattataaaaatacacagtgtttgccttgcaaaatatctctcgtatatttttcattttttctgagttgtactcgtagccgaacaactttacagaattcttctgaaaatccgcagctgttacttcaaaaactccttcaggagaataatcaagctccattggtacggctacataacctctatcagacaaagccgccgtcgcattgccagttgatattacgttgatatatgaacctggcagaactttgttcatagtcgtgaaagtacctccacctaacattattttctacctccgttcatatatttttttattgcattttcaacttccgaaattgtatagtatttcttctcatctaataagacatcaagcaaatcacgtctatttttgtattttgcagactgcaaaataacggatttattatatttgtcttttacttccatttcatccggctttttaattgccatatttcatacctccattaatttctaaattattcatatactcattatcggtcttaacaattttcatcggcacgtcataattgacaaaaacatgcaacacatcctcaacaatctgggagttgatattagacccatacaaataacttttatcctgtacttgaataaatgtaaggtttgtcatcaatttatccgcaatctctgacatctcagactgactgcctgattttccaggaaagaaatgaatatcaaatgactgttcgtgattatatctcaaacctagtgaaaccctgtttctgacagataaattgacaatataaaaacagggctttttcaagtcctgttttatttccttagtatatattttataattttctccaaacaagctatacaacttatttgatattcctgcaattgtttcattagtcaaatacttcacctagtttctgcaataaccgtttttctagcaattgtgggacaatcctttctatttctttttcagcatttgtcagcataaaacgcccggttacccagcctttatgattggttgtcctgtgcccatattcaacatagattgcataatcagctgtattgtatataacagatacccacacattacctttcttctctgccggctctatattccaagcacgttttaatgtgccagtagctacaggtgtatttttttgtgtcattcgtaacagtcgtgcggcaatttcattacaacattcttttgctaatctgtcatattctgcatttgttaatttatctagattatccctaaacacttttaaatcattaaaattacagcgtatcattatacccactcctctacaagagacaatataatttcttgatgatatgtgtacattgctggtgtgccgcttttttcgtatgtgtttgttatatcgttttgggtaataacaagccttgacccctccgctatttctatttcaggggcacagaaaagttttatttcctgtgcagttttaaatgcgccgtcctgttcagaaacttttgaaattgtcttaaaggatatcctgcatggtatatctttggctaagactacatcattttctatttcggttattttggtaacttcgttaaacacgcttttatttccgtacacggtcattctgccgttccacatgcttgtaattgcattctgaatctggatagctgttggcgttttaatcctcatttaccacaccagctttctatgtcttatcaagcaattgtaatcaggggaacggagttcgtttaccattttaagaaatctttgctctgctgttgatgttccgttaatgttgaaatcaagttttacatctccttccaaaattgacgaacacgctacctcaaaatcaaaactatccggcaaatttccgctattatatttttgatataggaactcaccacatacgctatgtatgaatgtatgttttaagtccttaggtatttgagaaatgttgcaaaacccttttatatgctgttcagcattatcaataataagatttataatcatctcatcagaaccgtcaaattcgttgtaaccataactttcaagagctgcatatatttcttctaacatatccgttccccctttcgtttacgctaatttaaccttgcttataatcaggctttcaggggacgggagaaccggaataaatacaccgctcgcttttgtccaaaccgctctagggtctggtgtctcccactgtgtcaaggtaatatactgctgacttgacttttctgtataaggtcccatatcctcctcttcgggagtgggtccccaaagtccggtacctatagaaccgtctagactttgaaataaaataaatacatcttcatctatataacgctttgtcttgtatttgtcttttgtgattttatatctgtatctatcatcgtttacagttattgtaaagccaaacatattactgagcattgtattaagctgaccgagcgaaacaaaagttccaactccatttacaccatacatagccgtctgtactgccttatttttgcatatcaaggttactatcttattacttgcaacacatctgttaacagtatgaccgttttctttcgcaatatcaatcattgaccgtatgtcccctaaaatatcagcttcgggagaactccaatctactgacattctattttctttaggcactccataatcaatggtaaaatcaagattattttccttaactgtcagcttaccagttgataacgcttccatttttgccacttcagttcttgtttttacgttatcagcaagacgacccatatcgtcaaatacatatgaaaccaatgcttgctcagatactccggtctttagatacattcgagttttttcagactgattaatcttttctttaatcaataatttctcaattgttaccttttctaacgtcggtcttgtgcctattgccgcttctgtatcaaaaccatgtacttgcgccattgttggcagattaagaccgtcagtcagtctaaaatactcagcttctaagtgctgtgtcttcaaatcaggaaataaagtgtcccctaaatagtttctctgtatagacagattttgcgaaaatgacaatctgtctttgtctgaaattaattgtaaaatattcatttatagtcctcctatactaattctattggtacagtaatcacagctgtatttgtgccgtctgatacagtgcaatcaaccgttgtattacctgccgttaccttagttgctgtaaccttatgagttgaagacgacaatgcaactgtagctactgccgaatcagtgttgctgtcatcaatagcagtaatcgttagctcaccacttccgtaggctatatcgctaccgctgaacgcggttgttcctgctgtatactctttgggttcaattggttctctcatgattacaggttcgtcaacaaaaacaaaccccaatgctgtaagtgctgtttttgccgccgaactcaacggagtatgcagtctattttctaaaactcttcctgcaaccattaggctggccggtcttaccccattgtcagagccaacagttacgtctacatcttcaaaaataagaccttttgcggttgaatcattcgctggataaggtgtaccgcctttcaccgttttatatccatattcatcagcttcaatatttgcgttgtctacttgtgccgttttaagcaccaaacctacttccgattctaaaaagttaggtctagtttctgttctttttattgttgttaaagccattactttcactcctattcattttcgttatttgtaacgccaaatttagcattatatttttgtgcgtacattgagcctacactatcatcgtcagactgaccgcttccggcacctggtacttgcacaggattaacacccttaaatttacccttgctcgattcgtcggaaccgaaaagaaaacttgttgtatcatcttctgctaacgctttgattttatcgtctatatccttgatattgtcattatcaagttctagttcatctaaattaaaaaacgcctttacagccttaatatttttagctttagcgtctatcaaagctttatcaagagcataatcaatttttatattcctaagttctttttcgtgattttcctgtgcggttttgttttcgttctttaatgtctcaattgtattttccaattccgcaacatctacattgtccaacccgtccagctggctctttaattcttttgcttttcgttccgcttcctttttatcctcattaactgcgttaaatcgggaaagcggtacataactgtcctttatttcctcattgtgagctttgataatttttgttatattttcatcttctatcccaagctcctttaaaaatgctttatccattaaacactacacctttcttgattacattttttatacgcggtatagtccgcggctatcagtcttgttcttttacgtctgcaataccaaaaagacgaattttgcacataaaaaaagagccttatgcggctcaatcattattaaatttatttccagttggctctcttgccattaactctcaacctcccttttcgaccaatacatattgacatacaccatctttatatgctgcgcactcttcgccgtcacactttccaaaagtagaagcggtacacgtcgttattttattttctattagacttccgtcttcgtcatagatatattttgatgttgtattttcaaatctattatctttatacgggcacttcatcttttgccccccaaatatataaatattaaacagaaaactaggaatataaagaatacagtcagccaaatataactcggtatgaaaactatactccaactccaatttaataaattgaacaccttgcagataataaagactacttgtaaaatcggtaacgcccatttaatcataatttcacctctgttttaaagcataataaaagctccgataaatcggagcttatttatatttcagaattttgataatagaggtcatcatatagcctttgcaataatatgccctcttcgttaatgtcgtaattctcatcaaaaccaatttctgttattttatcatctaaatctaacaggagttgatatatttcagtatatgactttttcaaatattttttcacaagttctttttgtttttcagtaatattcatcacttaaacccctttcttctagttgttgggttaacctgtattaacactccggtatcaggattaacagtagccgttaataagtcgccaataaatctttggctttttccattcttcaactttctaatatcacctaatcttgcaggattttgaagcacgtctaatacatctttgacatttacgccgttacgcctctgctcaaccgaccctattactcttgatataaaatgcttagatttatctgttatctttattccattgcttgtaatagtgcctattaagttatcatcaatttttttgctgatacttttatataattcaaatgtagccaaaggagataattcaccggattttattgaactcgaataagatgtaaactgtccccactcttttttattatacctcattttcacaaattcgtcaatagtaggcgcatttagtcctagaattgttacatatttattaaataacttacggtcattatctgatatagaatcctcaacatatttatttttccattctgcatattttatatcacccggcactgagtatatatccccatccttgtccctcgccgcccttgtttcattgaccgtaaattcatcgttaaaatacggtattgcaacagtccggcaacgattatgaaaaggcggtgccgtaatccccggcttatactcggatactaaaaaatgtgtcccgtctatatgttggcatatatcagatgttttgttatctaaagttgcgtcgttctgatattctttaactcccatttctctaaatccgtccaatgtagattttgatttgaaaaatgctgtttctgtcaatacaagattttcggcttgatgtttcttcacctcaaatcgttttgctatcttagcggctatttttttaggctgctcccctctgataactgactgtgttaacgttgtttcaagttctctcacaagctggggtctatgagtaccccaaattctttcactgaaatttttgccgtcgggtgtccagggcttatgtatatagttttcaattaattttgtatctaattttgcaaagctgctccctactccaaaacccttttgtatttcaaaaatagaacgataataggtatcttgatatatgtcagttataagattgcttatatcatctaactcattacccattaatacctcaacctgattctgcatttgtattctaaggctctctagacgattaatatgtaccctagcactaacattttcaagctgttttacccactgtttatttagggcgttttctttgcctttctgtatatactcttccacagtccatttaaattctttaagttcttttgcatttaataatctttttgcttctgtaaatgttattttattgttttcagcaaatcgcatataccagttatttatatcgtttgttaccgtctgcacagcttcattgtactgtttttcaagattgtgaaagtattctatatttttattactttgtactttttcaagatacaaaaaacgccccgaccaatattcgccgttgcgtttaagtaacttttctattttttcattcttcggcatttcctaaatcaccgctttcacctctcatctgattgactaagttattatactcatcgttgttcgttgtattgtattcctcttcaactcttctcaattccttttcaacgtcatctatccaaggcacttgagaaattaatgttttttgtgaaatttgcactcctaaattttgaagcattgtcattatttcactttcgttcatcatcatatcgcggttgaatacaaattttactttttcgttcgtaaaatcctgacctgtagtattgtataaatacatatcagcaaaccacaataattcttttaacgctctttgaaattctaactccataccattagcatcaaggtcaatatcattatatatgctctgtatattcatttggtttgcattaccgccaagcctgtcgtcttttgcatcataactcattgcgttttctattaacgctttttttaattggtctaggatagctttataattttcgctgtccacctttacttctatagtgcttacatttccatcaataccattaacggaccttatttttaccgctccatactgcgcaatattatgtcgaaattcttctaaatccgcaccgtcataattaagcaatacatatatagtattataagggtcttgaagcatgttatcttcaaaatttgacattattagatttattgcgtcttgtattgattgtaccctttctataagcggttgttcctcgtagttatatttaaatggtatgagcggtattttatcccaactcagagatataacattatcatctttatctttgtatgtaagatatggttcaggttcacgctcagaatcaatcactaattttccattttcatatatataatattcaatcccctcaggcaagaatatatcaacatgctccacatctttttcgttttccccctcatatgttgggataacatataatctgcaagccatatctatatatctgtgctcttcatcttgccaaaatggtaatatctcaatacctgagaatattttgacggaaaactctcctctatcgttgatatacggatatagccatgatataccacaatttaaagcgttttttgccgtctgtttaagtattgcatgaaaattttcgtcaaatatcttattaagttcgtcggtatatttatcgttatccgtgtcaattgctatagggcgaccgcaaagaaaattagacttttggtctacagctttgcgatattgattattaattattttagaattaggcaaatagtgctgttcggaagcctgaccgccctcttcaatggcaagtcgcttttttttgagtatctcatgttttccatcataataatttattcctgtaagcatttttttacgctttttgctctgcttatatttatttaattctatttccgctattcttttcatagttggcgctttatttgcgccttttgatataatattaataattctctgcgtttcttcgtaaaaattaaacattttatcctcctgctacttaaagctaaatacatctccctctaatttcgggataaccgcatatcgcatagcgtccattaagtggttaaacttatctattggtttattgatactctctccgtctttttcggcgtatgagtaattattaatttcgtttataaagtttctgcatttagggtgtataataaaggtgaaattcataagtttttgtattccgtacataacctcatgtttgtacgctccctctatccttgataatcctaattgccttaattcttcaatcgtttgaggtacagcactgtcacctattattttttctttgccgtaacccattagttgtatttttggagccaattccatgttggtcagtcccctttcgtataactcgtcaaatacatatatctccttatttttttcgtctaccaatccgcagaataaagctgaagggtcgtttgtgtacccaaaatcaagtccaaacgccgatactactccaggtcttttgctaatttcgtaaacattaaagaatttctctacaaatttcttatatacgagaccttgaagaactccccaattgcctaatgtatatacattgtgaaaatatgggtcactttcgtcttctaacgcttctatatcctgagttgtaagaaatatattatctttatatgtagtctttaaaatagatacttttttatcttcatatttcttgcaaccgtcttcaaccttattgtcgaaaaaatcattataaatccaatgtaatttgaaaatagggttgaaagccataacaatacatttgcttattttagacggtccacgcaaacgcttcttgagttgcaaataatcatttcttttgacttctgtagcttcctcaataaatattcgttctataacgccctttcgtggtgttatactctttaatttctcaacgtcatctaatccggcaaagactatttgcgcttgatttaccttgtttgtaataaccatatccgaaaaattaaagctatataaattactaagttccatataattaatagctttatagatttcattaaaaactgaacgtttaatacttttgccgaccgctctacatataagccaattacaaccattcatattatcaataataattttttgacataaaaaaaacgactttccgcttgaggaaccgccgtaatatatctgtgtaaattgtggtttttgtaaataaggtatatataccttattgacttttaaattaatctccataactatcttccatatcgtttgttgtagccggactaatattaataattatgttttggtcttgtgtattgtcttctgttgttggtttatctctccacttatttggcttacgatttttaagccaaaatatttgtgctgtagtatctccaggtatatgctttatagtagttatagttttttctccacctataccattctcctcaatcttcttttcttctactatgtaacctagcgctcgtttaagcagtgcattctcaacctctaaatctactacctctttacccttttttaaggtctcgtctatctctgcatatttatttttccactcatacagggtacaacacgctatacccatgttatgcgctatttgctcatcaaccaatccatctctagcccagccctctattaataataaattttcaggtttcaaccattttttatatttgccctttgccataacctcaccatttccctgcctgctttaattgcaaaatcgttcttaaagcagttacatccgggggaatatatttttttgttacttttattctcccagtattttcattattcttattttttataaactctttttcttcaatttcaaaaccataagcacgtttttctaacgcttcttttattttggtatctatttccatttgacatcgcacctctaaatcatgtataatggtgcaggtagcaatctcggccgagaagggctatctgcgttagaggtaggtgctctagcgtaagtgtggggcgttaccagccccccacactgcctaatttatttcttttatattttttgtcagaaaataaaaaaacggcgtatcaagtgccgctattatcaacttaattagatactgccctatcaacatacctattagagtaatctgattgttaaatatccaaccaaatccaaatccaaaagctatcgttataaaaattaatgtgtctacaaattggcttgtcattgtacttgcattattccatatccagcgaccaccttttgtactgccatgttttttaatatacttatctcgcaatctatgaaatatatgaacatcaagattctgacttactagataagcagttaaagaaccaatcacgaatatccaattttgtcctaatatttttatatatgcttgttgcatttctgcgtcaataaaaggtaaatatttcccaataataattataatcgtagcagctatctgtgaaataagtcctaatcttactatatgatttgcttcatttttcccccaaacctcaccgactacatctgtaattaaaaatgttataggatagcataaaaccgcacagggtatcgttatcactgaaccccaaaacggaataccggtattaatgattttacctgttattacatttgaaattattaatgatactacaaacaataccatgaacttttgttcctctcacatttgcatatttaatcattttgtttattaatggatattctgtcttttttatatcaccatttgcgaaaccacctatagctatataatcatattcatcgaccattcgtttgaaatagtctatacctcttgacttatgccacacaggtatagacttaataccagtttggttctcaatttttttgcgccaaatttcaactttttcaagaccaaatatacaatcaacatccatctcaaaaaagtattttacattgtatttttttatatggcagatgtacttttctatatattcctccatttgtttttctgttatagactttccattcatatatgaaaatgctccactgtcaagaagaaaattatccgtgccaacatcattctgaaccattgcgcaacatttttcgcctgaataaaaagtctctagtaaatataatggtctacaacattttatcatttcttttctttgttcttttttcacaccactacttgatgtagcaagatatattttcatagttcaaaagtttctccacaatgcggacatttaatagatttcactttaacattttttactgtctcatctgtataaaaatcatcatctgaaatatccaatgtttctcccaaatcaggaaattcaaattctgaaatatctatatctaaactttttaattctttttcaagcatttcaaaatcccaacttgaatattctgccgtcttattgtctaccaatctatatgctcttatctgctccggtgttaagtcatcaataactatacatggtacagattcacagcctatttttaacgcggctttataccttgtatggcctgcgactattacattattactatcaataataattggcaccctaaatccgtaatctgttatgctaactgctactttctcaacagcttcattattatttctcggattattttcatatggcttaatttcttttgttgatttatatattatttccacaattaattacctccattaacatcacagccgcccacccctcagcatttatttatgatgtatcattcccacaagacctaaaatcgcaatataaaaagccgtccccataaggtaacggctcatagaaaaaaatttaaaaaggagaaattttttatttcctacattatacactatatcacactttcaatgtgacattcaaggacatctttaacttttcgtagcgctttttcatgcaatctcagtatttgtctgtatgaatatccaatattttgtgatatattctcccatgtctcgaaattaatgtatcttgatatgagtatgtttttatagatgttgttttcaactttcattattgcatttgttatttgtttcaagatttcaaataaatctgtcttatgacagtctatctgcctgcagtaatctgcgtatgtaattaatttattctctgttccattcccgtgactttcctgtaccctttccgatagtgttattgtcgtacccgtcactatgtcataagcgcgcatttgcgctttttctaaaattcttatcgtctctcgtagtttataaccacgatttaaccactgttttgtttcttctatagtcacaccctgcatattaattaacactccttgactttatcactattatgtgatataatatgtttattatttttcgagcgtcctcgcatatgcagggcgtttttttgtttaaataatattatttattctttttctctacaaacctttgtccacaacaaggacaaaactgttccatttgtagaactaaaatataatcacacatcggacatctaacggcaggtttaaccgctcttaatgtgtcagtatctaaatatggtttctttggcgtatctctttcaattaatcttttaatatattttttcttcatttaattttcccccttaaatctttctggatttacataactttcgaaatgatttatgttatcttcaagtcctaacgggcttaattgtaaaataacatatcctgtatctaagtatagaggatattcatcaatactaacaatgccagttaatataaaacgtcctgtatattctccacgcttatattcatttagtgcaatgcaatctccggctacataatccatgtcattttttctaatttcatatgtttttttaccttctattattttattaaaatattccggttcgatttttactgcatgtaacattatttttcattctcctttgtctgctgtattgcatttaaataatcatttattcttttagtcattaccttttctgcttttctttcaagtttaggtcgcatatattcaacaacatcatctactatatcaatgacaaaattaggtgatactatatattcatctcgcatattaaggtcgctttctacagcgtttaaaattaaattcttaataccttgtcttaactctgtcatatcttctgttgttaatatattcagtattgcttccatatctattctcctatttactgtctgtatcaatcaatagaatctacacctattggaatccacatcttagggttaaaattaagtgtatatttatacttatctacatcaccggaggttatatcctctacgacatatgttacattgtcgctaagtccaatgaaatgctttttatactctccattttcttcaacaacaacttcaagttgattgtcagttatatccgctttaatcgacattttgcccgtcatttggaacaatacatcgccttgaatgcagttaataactgtaagttggcgcacatcgttaaaattgtcggcttgttgcgacaaattgtaggacacacgtgatgcttctgtgcaccctgcaattaacataactaagactattgatattactatccctataatttttttgttcattttcatattctccttatctcctctataacattcgtcctgggtatataggttctattttgctgttttttctctgctttccttatatctcctaataatcgttgtaatgaccctataattgatttattatcttttacccatattgatattatttttgttgtttctgtcatatccttcgcggttcttctttggcggcgtacagattgtaatttagtagctagtctcgcacgctctttatatttaaccgggtctatttccatgttatgtaatatatcttgcgtagcttcatcgcattcttttaacatatctttggcaatatcatacatttggcattgctcttctatgtatgataaaaaatcagctattttatcacttatcatcttttgtatcctccttttcaatcccattttttgcataccacttacaaacaaaacaatctatcccgtcaggtgccttgccgcacaacgtagggctcggcactttcggcggcttagtgcatttagttttcaattttaactttcatctcctttgcaagctgttttattacgtctcccccaaaactattttgggttaactttataaattcttgcaccgtcattttgtcgtttttaacatcaatgttgttatattctgcaaaattatcccgtcccatagcacaactacctgttagtttatggtgccattcgtaaaaatcttttacgggatatttaatatttaatttaaatttttctttaaaaagatttattttatcatctgtatctaaattacatattattttatattctaattcttcacacgcttttcttaacgtgccaccgtgtgcaaaatagccttctcctttggctatgtagcacggtcttaattgtagttctctagtaactatgaatcctttggctatattatttctgactttggtaatcattgttagagtgttatctataatatgcaggtcatgtccgtttatagttttaatgcctttgacataataacagccatagccctgtccatatcccttgccatcaccatgaccattgttacagcaatcgccactgccatagccgtttccgttgccaataccgtttccactgccataaccatcgccactgccacaaccgattccgtttccgattccgttgctgttgccatgaccattaccacaaccgtttccgtttccgtttccgttgccataatcatggccaatactaaaatcacagtctaaatcatttatgaatatcttaattttgtcacttaacatttccattctggcgcaccttctataatcttaatagatttttccgtgcaagggataatttcacaaatatctgttaatattagactatcaacttttacggatattttactgttttctatatcttttatcccggattttgccatttcatttaggttagtagcccccgtccaattccatatattacgacattcttttaattctacttcttgtccatttttgtctaccaatgttccaaaaaatactcctgaattaattcctcttgctattacttttttgccttttaaatctatcattttttattctcctttttattattcttcgcaaatcgtaacctctaccctggggtttgctttgtcaaaagcaaccatatccaccaaacctataacgtacttctgactgtcgtttggtataactccggcggtctgcaatgcgtccagtatatactttttaccggagtatatattgtcaaggtctctccttctgtccttttcaatccataaaaattctatgtataccggcgtttttgctttacctatccgctgttttcgtatctcagaaattatctgagtgtcaatccgcttcttaaatgccgccgccttatatttgttgtgcctgcatacgttgatataatcattaaggctcggcagcctgccgcttatcgtaaattttatcatcaatattcccctaacatgttatcatataatttcttttctatttcctcataattagtcttgttagtatccgtataattattaaacttgcttttagctacgctgacagtattagtcgtattatttttaagcggatagactgacttccagctattttcaattgattgattaagtatttcaatctgtgtttctacgtcccccattttagaaactttagtgatgagtaattttaatgctttgtccgtcataggtgccttaatcatctttcgcatttttataaattctcgcaatgtatcttttaattcttcattttcaacaagagaatctattatctcatcatacccggttttctttcttctttctttctttttattagatgtaatattaaatgtattattatatgtattattctctctaacatttttgttaataggtggcgcacttttttgtataggggtcttaacatttttgttaacaccccttaacatttctattggtggggtattatcatttttaataatagggtcatagcatttttgctgaacaattgtcttgtttccagtgattgacaattgtctgcattcaatttcttttgtcccgcttttataaaaaatattgcttgttaaataccccttatcacaaagcatttttatccacctagagaccgtaacggttgttacgttatataaatcagcaaaatatctgtttccagcccaacaatagcctttttcgtttgtcagagccgttatttctccatacaatagcttcgcgttggctggcaacttatcatcatacctcacatctgccggaatgatagcataatacgctttttgttcttccattttctacacttccttaaaatggcaagtcattaggtaagtcgtcaagcacctcaaaatcatcagccgccttttgaggtgttgaattttgttgtttagggcgactgtaaccgttatattcatctctcgccttttttgtttcaccaaagtctagttcattcgctataacctcagtaacataattctttttgccgtctttcccttcccatgtacgagttgaaattcgacctccgacaatcaccatcatacctttattgaaatatctgccgagaaactcagccgccttgttccacgctatgcaatttataaaatccgtcttttggctgtcgccataaccgctggcgacagccacgtcaaaactacatactggcttatttgtgctcgtatatctcacttccgggtccctggttaaccgacccattaatattactttattaatcatttttcattctccttttaaagatttatataactacaatcgaaaatttttctaaattcatcttcgctccaaccgtatacctccatagcctttatttgggctattcttttcaatttaatcattatgtaatagtttttgtgtgcgctgtattccccgaatatatgacatttattgtggtgcaaatagaccgtcaagccgtatatttccgacataccacgaagagcgccgccaaatatatgatgcttgtctaaatggtctccgcattcgctcatttcacagatgtagcaatgcgatttgtcatattgtataatgctatccatttattttttcagctttccataatgattttagtttagcgatttcattcggtgtcatggtctgtatcccctggtctttgcaatcatcaataacactatccaacaatcttgacatctgcttagtgttatatgtactactgccgtaatacagattgacaagcacaaatccatctttattggattcgtccaccctttcagctatccaaccaacaccattcatctgccagcccttaatcaacgtatcggcggcactttcgttaatttcagcaacacgatatacgttagcatttaggatatgctgacggtatacagattctttatcaacgcctattttatcggctaatttgccgcataatacccatagataagcgttagcattcagcgaccttttttttcggtgttttttgagctcaatgtctaataacttacattgtgacagctcatcataagcaagttttaaatcgtttttttcattgacggcaagtgttaatttgcactcgccgtctaaaaaccccatgctcacgtctctaattgttccggtcaatttcatttcttatccgctccaacttttccaacttttttaattgacccatcaagcattgttatacattttttaaaattagtgtaatcaaattcattaaaattcgagcatttatagaatttagaaatttcttgctctgttgcgtttctgccgcacacggtgttatattcctctaactttgcttttaaggtgtttacagccgctatatttattgtttgcggcggcttttctgctggaatatcaagttgttgcttaaactcgtcgctttcactgtcgctatatacacccgaataggctaatttagacagttttaagacaactcggtcaaacagacgtttaaacgccattgcatatggatattcatttttacaattactttgtgatacttcccctacctcgaatatgtgttgttcaggggataaataagtatatacaagagaatttttatatccgtctttgtctaacgttacgcatccaggtttgaatttcatatcttcgtttaagttgtcattaattttaagacaaccgttgtgagatattattaatccgctatacatcattttacctgactttgtaagattcatgagaatccaaaaatcgccgtcagacaagttatatttaccgctgtcaatcatttctatggctttatctctagccattttatatttaggcgattgccatactggcacattttttcctgtttttgagttatactcttcagctttttctccaaaatcatgttgtgtcatatatatatcctcctaaaattttacatcaaatgtatccggtgttttttcaactacaatacagtcaactatttctcctgtttcggtgtcaattgcttttccgtcaatcatattaatacgctttttatattcgccccattgtggtttttcaatggtttttatgtattcaggcgcagtattttttaaccattcaattaatttctcatcttcatataccgctttgtttccaccgtattttttaaccagttttccgcttagtagagcatatgattcttgcgtttttgtgcttttatgctcaactttatcaaaatattcagccaattttgattttaaaaatgatgttgaattttcgcaattttcttttattttacttattttgtctttaagctctgctatttgattttccgctatgctgataagtctatcacgttcatttacttcatcttttatttttttaattgcccagtctgccacattgtcatttgtgacaacaaattctgttttttcgtcttttaaatattcttctgtattcattatttattcctcctctaaagaatccaatatttcatctatcaaggttaataatttatttgccatatcatttacttctggaatattgtctgtagcgtttttggtaatgattttctttgcattttgagcatagttttgtgcaattagctttgtatcaacaccactagatgaacatatcatatctattattgactgtgttactatgcttagatttgacaaaatcaccgaaggttttccattaatcccaattgtgcattctccatctttatcaatttcaatttttagtaaatcatttttagacattttcattatttattcctcctctgcgttgtctgcattgccttcctttacatgacgacaatatgcttctgcaagacactcaaaaccaacacctgtttctgcacttataccatttaatatatcttgcattactgcacccaaagccgccaaaatttcagctggatttccatcaactcctattgagacatttaattctttatctacactaatttttattaaatcgtttttagtcatcttcatttttttattctcctcgtattaaatttattttttatttttttaaaatgtttttgcactgataaattttatttctgaccgtgccgagcgaacagcacggtcaattattgctaagctattacatataatccttttacaccgcataatttttcttctaaatatgctttaatatttttcttggcggtaagttcccacgctcctccgtcagcttctttgagtaagacctgagcgccctcttttagcctgagtataaattcgctttcgggttgattgacttccaaaaacgttctgaatggtgccaatattacacgattttttatttctatgttttctttaagagcgattccttttatggcctcaactgattggctaatgccgttatcatctgtcgaaactttgctttcttctgtaacttttttaagcaaattaattatgtaatcaactccgtcacctggattaaacacgctttttagtgcgataatcatttcctctttattgtgaaaataattaagcggtaaatccggcaatttagcgtctacagaaaacaaccaatctcttgtagctttgtcatcataagtcgtaactacttcaatgcgcgtgggagttatgacatttacaaatacatctttatttttagaaatttttgaagtttcttcttttaaaatttctatcagtgcgtcaaggctgtataatttcaataccgaaggtctatattccggtggttcaattctttgtaatttcatgtcactataatgttctccgtcaatgtcgaacacctgccctctgcacatctcttgaattttctctattgctgctttaatcattttaaaaactcctttattttatatttatttagctaatcttaattttggcggctctgcctgctcttgcccgtctatattcatttgtccgggtatttgcctggtaagctccaccgctccaacctcgccgttttcatctgcgcctatatataatgcggttgccagcggctctgtgggttgtaatttacactgtgcttgagttgacacctgcacatttttcctgtctgaagacggtgtgaatttaaccgtcaattttagttctcgcgcttttgtcgccgctgtatttatgtccataatgttgtcaataattttggacatttcgatgtcacaccgttcctttattgctccctccgccatatctaatatgcttttatacattacattttctcctttcattgtcttaaattagatttattttttatttttaattacccgtcttatgttattaaacttacggactttttatctttctttcttttttgctctacatagtatttacgctgttgttctaatattttatctttgtgtgcggcacggtatttacgtatgtgctcatttatttcatccctatgctctgcacggtattttcgctggcgttctaatatttcttttttgtgtgagacgtagtatttatggttatattctgcttcctttttgcgtttattatctttattatcatgcctaatctctttatctctttgtgcaatttcatttaaatcttccggtagaagctcgtctacaacgcaatcaggataaagacaattaaaacaatccctattacactgcattaatatcacctcacaatctctgctacattcatcattttcctacttgacagatttcgtaagatatgctaatatcaagttggatttattttttatttttttaattgcccgttttgtgctccgacacttgcgggcttttagttttttcttgtattccatatttttaaacagtcttctttactatttctcacaggcgtagtcagtccacatttcggacattctattgtgtttctgccgaaactatcatgatgataagctacattgccgcaacatggacaatttaaaatcttattctttttttcatttatctttttttctcttctctttttctctcgttcttccatttctcttattgctctagccgcttcaatttgcgctttcccaaattccatattcttatctccttttttatatattttcagaacttatgtacttatttatatactttttatattttccgtttttttgacacttcttaacaatatcttcaattttctgaatacctacatcattccaaatagacatttcaggattgttttccgatgtcattcgcgaaaacccgctatctttgtagtgccatatacatatatgttcctccgtttcaggcgtgtacgggaattgtccttttgtgtctcttttgtggtgcatacacttatcactacaatatattcgtcgtggtttatgtaagggttttccgcatactacacaacgaccatcatagtcagtttcatatactctcattttcccaccccctctctactcattgttaattgaccaaaatattaaaaatattaaaggtatcaccaaaataacaattgcttcattcattttttattcccctataatacgagtttaatgtttcgtttgttttccgctttgttagaaatagttctgctacattcttcctcagaaaagtcccaccgccgattatcaggcttgattacaaccttacgcacatcgtcagctatgggttgttcttcagctatgtcctctgcacaattcaaaaatgccaaaagtatcatcataagcggcactgcgtaaaatatgggataccattcaagcgacctaaccataactaacaatacaacgccgaccaccgcagctgatattcgtataatccaactatacatttgtctttcctccttaggcttgctcgtaaacgcaaggcacatgttcatcttccgcacccccaccccacaagtcatatattttaaaattgcgtggattatattgagcatctatttttttgcatttacttatataccctttggctgtttttatagaatttgcatatccaaaggtatgtatatgactacgacatacaatttggtcgctttcgtattccatcatgtatcttttcatttgacttcacctccaaataaatatttaatattttaaaattagggaaactcgctataaatatttgtttcgccttttctgttgatttggcgtcaacaattgcataatcagtcttaattatcggcaccccatcatcaggtatatagctatatttaattagatattttttcattttcaatcacctcttaagcatatttataactgtttatatgctcttgctcacgccatttataatatgccggtatatcaacataccatttaccaccttgcttatatgccggaaaagcttttttgtgaatccaacgttttactgtttgctcgtcgattccaaaatattctttgaattgtctaagctgcatttgttgaattttacattcttccattttcatcacctcttagtagatttatagtagtaaaaaataatatattaattattaaaaagttaaaaactttgttcttgtttctgaacttttggattaaaaaaatatgtacctatatatgaactatcaaaatttaaaagaattgaagatttaaaaatctccgttggcgtaaactctgttttgttcgtcaaacgactgctaagcacaggagcagtaagaccaagctcttttgcaaatgatttttcagttccaaaacattcttttattcgaccacgtaacttactatagtcaaacttttctttttcttctttattcattttaacacccccttagttcacttttatgaacttagtatatcacatttctgaactattgtcaagttttttatttgcttttatgaactttttttatttctcgtgatttttatgttgctttttctgaactattgtgatataatctgtgcgaggtgataataatggctaccatttcagaaagattaaaagaagcaatgttactcagaaatgttaaacaaattgatttagtaaatgctacaggtattggcaaatcctcaataagcacatatatttctggttcatatgaaccgaaacaaagaaatatttataaattagctaaagcattgaatgtaaatgaagcctggctaatgggatatgatgtgccaatggaaagattgatgatagaagaaaatgatagtaaaaatattattgctagcaatctgaaaaaaataagggcggataaaatgttaagatacgctgatatatctgcattatcgggagtttctaaagaggatttacaagcatttgaggaggggacgaaacgtccaaaatccgcagatgtaagaaatattgaactagcccttgacctcgaaaaaggggtgttaaaagggaaaaaaccatatattccaacgggtcccgatgaatctattccgaccaaaccaaatgaaatagtggtcgacaataagcatattatattgtcccctgaagaatacaagaaattaaatgaatttttggggagagatttaagagaaaaaaatgaaaaatatatagctcttaaaaaggaaactactgagttattggaaaaaacaattgacttaatttacaaaaacaaaataagtgaagataaattaaaaaaattaaatgaaaacctgaaacagattgctgaaaataacgaataatcatactggcaattatttctgattcaaattcaaatcatatcatgttataatattcttgaaaatactacaaaaaaaggagaatatatacatgaaaattgaagatttgaagacaattagttacaaaattttaaaaggcgctcaaattagcagccttccggtagatagccataaattactatcttattatgatgtaaaacccgagaaattaacagatgttgaaaatgatttaaaatatctaatagcagacagaaaaacaacattgctcggagcaaaagaaaatagcacattaatatacaacgatactattgcatatagcaattatatgcttatacgtagattttgtgaaaaaatactcaaatcctccgatatacgtgatatagagatattaacattattaataatgtcaccacctgttatagttggatatttaggggtatatgatgtaagacagataagcgcattgtgccaaatacctccgcataaaatacatcagtattatgacgtatacgctcaattgtatgccgaccccgatattcagcttttggaattatttatgccatttttgcgtaaatacaagcgcgaaaataagatgagatttcaaaggataaagagcattattcagggtttgaaggaaaagaaacttgatgaagaaaaagatgtgttagtatacataagagacagtgagactgtatatcacggtcccacttgtccagaaataatagacgaaatagatgttgaggtgttagacttatacaccgccaaacagcttaattataatccgtgcccgacatgttttgatttagaataaaaaaaagccccggtgctaccaacaccaggactaaaatatacactaggagtgtacatagatactattaattattataacatatacactcctttgtgtcaatttataatacacaaaaaggagcgttatttttatggcaagagcaaagtataaaaaacgaagtgacggacgttatcttgtacaaattcaaactggatttgatgaaaacggaaaacaaaaatttaaaaatatttacgctaaaacaattcctgaacttgagaaaaaaataaacacatttaaatataatcttaatcgcggaattgttgttgatgaccaaaacctaacttttaaagaatgggcaaacaactggcttgatacttataaaacaaatgttacaacacgtactaggaaaagatataaaagcataattgacattcaacttaaatcgcttcataacattaaactcagcaaattaaaaacagttaatatacagaagaccatcaatgaacttacaacaagcgtgagtttgaccattaaaattttaaagcagattattaaacaagctatgataaatgaacttatttttaaagatttaatgttaggtgtttcattttccacgcaagagccaaaaaaacggcggcaacttaatgaacaggaacgtgaagctatagaaaaagcggatttttcggcaaaagaacgaacatttgtatatttatgcttatatgccgggttgcgacgaggagaagcgttagcgttaaaaagaaatgatgttgattttaaaaatgggattttacatatatctaatacagtaatatataatgataataatactccggagctgaaaggaacaacaaaaacgccggccggagtgagagatattcctataacaaataaattagaaagtgttttaaaagagtatattaaaacaaatgtaaagggaatgtttttattttcatcaagaaatcatacccttgtaacaaaaacatcatatcaaaatatgtggaaacagattatacgaaaaatgaattcagtatcaaaaattcctatcaatgaaataacagctcaccacttacgtcatacatatgcaacagatttattttatgcaggcgtggatattaaaacttgtcaatatttactaggtcattcatctattaaaacaacacttgatatttatactcatttagatagcgacccggcaaatgtagcaaaaaagattgatgaatactatatatctaatcagtcaaatatcagtcaaaaataattttcaccattaattctaaaaaaagcaacccccgaaaacaacatgttttcgggggttattggttatcttatttaatgatttcagtaacaacgcctgaacaatcggttctgacacatacaagcaatgccgcgaccgcaattctgatgtttgtgacaacagttttataatcaagactgctgtcgccgaatacagtaaccgcatttttgaactcatcatcaaaagaatatgacatttcaatattcacatttcctattgagcggccatgtccatacttcgtataaatatcagccctacagctattttccggtgaaaggacgttcatctcctttgttatctgcgcggctctttttttgaatcttatcaccgtctccggagctatatcactccttgaaatcagcttatatattccgtcaagagccaaacgtgcgaatgccatatctatatttctcgactgattcaaatatcctatattgttcacattaacagtctgagaaaatccaccgtcagcctcaattaaaaattctctcggataatctgttgcggaacgtatacccaatataattggttcatctgttctatatttttctatattttttggattcatataatatgtgccgggcgcaaactcagatataaccacattcgacaaatacggagaacataaacgttttagaaaacccgaaacaaagctgcaaaaattatgtccgcggtgcatttgaccaaatataccgaggcactcgcttgaaaacttctcataaaatccattatgaatgccggaacctattgatactatattaaatgttgtttgggattttccgacatgctgaacagctgaaccaaaagcttgaccgcttttgtaaacatttttaattatcaaattttgaaggttatggtagcggcaaagcaatcctgacgccgtgataaaaataatttgagccccattcgatatatcaaaaactttctgtacagcatctttatacgccttttctcctatttgaacggaggaatcaagattccttaaccactcttctacttttgcaatattcgttaaagtcggagctaaaaattcattagaataaatttctccattaatcgtagaaataaaaaaatgtgaataccgattcatatttcttaaaaattcagtgagcgccgccttagccacgttctgtaatgatgcagacgaatccgctgtatcaagtatataaattatatctgcattttcagccggtgccggcacctggggtcttatcagatataccgcactgtaaccgctcgtatcatccccgcatacatatccaatactctcacggcttgggtcataacacagacacaactcaaatacactgccggattttccggttgaaaccaacattactccgctgcctgtaaaatttttgccaatataattattatctttcataatatattgattattaatcggcagaatattgtattcgtgtgttgacgaatacatccttttaagttctttattgtttggaacagcgacgctaattgagacgtctatattttcagagtaagaattttctgctttgctgacatgttttttgactgattcaatattttgtggcaccgaagtagatgaataaagcggtatttcaaaaataaggtcattgcccatacactttggaagcgctgtagcttcgattattaaattaaattctccaaaattttgatgcaaattattaatcttaaaactgtagcacgtacctgatatctgcttcagaattacacgtgaggctccgcttttttcctcatcatcaaattcagtaatattgctttttactgaatattcaccgtaatctaattcaaagcctcctataactgctgatttaggcatatcaaaaaacaaattaaagtcaaaaacattgtcatctgcttctttcacaaaatcagttttaagaacaaattcatatcttaaactaagtaccatatcaaacattagttcagctttaatatcaaggtttttcagagttatatatttttcacagttttccatatccatttccttacttttgattttaataatataaaacattaaaaattttcataaaattcttatgtaaacaactatccgcagagctgtaatcacagctctgcggacaaataaagatatttttaactttacaaagtaacaattttagagtgatatcactcatcctttataaacaactctttcgtatatggcagagacaatatccagtcacaataagcatgccattcgtcaagcttatggtttcttctcgcataatacatattaagaagattctcataattcatagttattgtgcgcttttgattatagtttgacggaagcatctgtataatatcataccaatccgctttgtccttagtctcaacaaaatgtttgcgtttaagctccataaactccatataagcggtaaaagcttcaagagcggttttactaagatgatcacaagaaaaatcagaaagttcaaatttctttgaatgtattttgtgcatcgtacttgtcgagttagccacggtaccaactttgtatgtgtcaaactctttccaccaataaagcggcgctgttatatcaacgcttaccaatatctgacgaataaactttctatggtcgctacctgctctgcaaagcctgattgccagcgaaaggtcattctcaccgagaatgtagtcgccattttcattatagcggctgtctattctttcccagctgttcatgggatttcttgctccgcggatagcgccctcaagattcattaccttagcatattctatttttatcatataaagttctccaaactaaatatcaagattgataactgatgtgcctctttcctcaataaactttcttctcggctcaaccttatcacccataagaatcgtaaatgtctcgtctgcctgctgagcgtcttcgagatctaccctaagcattattcttgtatcgggattcattgttgtatcccaaagctgcgacgggttcatctcaccaagacctttatatctctgaacgctgggcgttctgccgtcgcccatttcagtcagtatatcctgaagctcctgatcagtgtaggcatatttttcaatctttcctcttgaaatcttataaagcggcggctgtgctatatacacatgtccgtcctcaataagcgggcgcatataacggaagaaaaatgtcaaaagaagcgttctgatatgcgctccgtcaacatcggcatcagccattataacaacttttccatatctcagtttgtttaaatcaaactcgtctccaataccggcgccaagcgcagtaatcacgggagtcagtttatcattgccataaatcttatctattctggctttttctacattcagcatttttccccaaagcggaagtatagcctggaatctcctgtcacgcccctgctttgccgagccgcctgcagagtctccctcgacgatatatatttctgtataagtattatccctgtcagaacaatcggccagttttccaggaagagaactgctttcgagagcagatttacgtcttgtgctctctctcgccctctttgccgcctctcttgcgcgggaagctgtcattgctttatcaacaactattttagctatggttggattctcttcaaaaaactccccgagtttttcattaaccatcttttcaactatggttcttatctcgctgtttccaagtttagtctttgtctgcccctcaaattgagcctctgttacctttacgcttattacacaggacaaaccctcacggcagtcctcgcctttaagattagcgtcagcttccttaagcatacctgtttttctggcataatcattaataactttagtaagagcagacttaaatcccgtctcatgagttccgccttcggtggtgttaatattattagcaaaactcataatcatttcgttatatccgtcgttatactgcatagcgacctctgcctcgctgtcctctctaacggaattaacatatataacatcctcatggataacttctttattccggttaagatattcaacaaactcacgaataccaccatcatatttaagttccaccatctttttatcttcaggggcattagttcttttatcaacaagggtaatattaatcccggcgtttagaaacgcttgctcacgcagacgtctgcgaagaacatcataatcatagacaagaccttctttaaaaatctcaccgtcaggtttaaaatgcaccttagttccggtctcagtcgtctctcctatttgcttcaaagagccgacgccttgtccccgttcatatttttgataaaaaatatgctcgccatttttgatctcaacttcaaggtactcagaaagcgcgtttacaaccgaagcaccaacgccatgcaaaccgccggacaccttataacctccgccgccgaattttccgccggcatgaagctgtgtaaatacaacctcaacagttgatattcccattttagggtgtatacctgtcgggattccgcgtccgttatctgttacggttatagagttatcttcttcaatttccaccaaaattctactgcagaaccctgccaaagcttcatcgatagaattatctactatctcgtaaacaagatggtggagaccgcgtgaagaagtagaaccgatatacatacccggtctttttctaacagcttccaatccctcaaggacctgtatttggttttcgtcataagtgtcctcaattgggacgctcgtaatatgttgttcctcttgcataaaattcactccatttatagtattatgttcttgcgtctatcttatttaagtattactcatcaaggctgtacagcgaatattctgaaaagttttttgtgcgttttactctgcctgcgagcgcctttgaagaaatatttgttatatacacaacgctttgattatttgtttcgcataatacaacagatttcggaatatcgtcagtaacgcttctgacaaatccctcttcttcggctattctgagaaattctcttgaatatttagctatagttatattatctaggtcaagtatcgctattatatcatcagtatccaccgtagtgtttttacctaagtgcaggtacattttctcatacctttctcaagacaggctgctaacaactttcccgtcctttataaaaattctatttattgattcaaaagcagactctccgcttccgataagttcttctatatcagtgcaagtaattattatctgcatatccttaatattagcaagcacaaatttctgacgctttctgtcaagttcactcattatatcatcaagcaaaagcacaggggtctcatttatatcttcttttattaattttacctcagccaatttttcaacaagaactatagttttttgctgcccctgggaagcaaacgccttcgcatcgcggttatttatctcaaacacgatatcttccctatgcggactcaccatggtctctccatattccatttcacgtttataactcgaagaaatcttctctctaagcctattggtcacgtctgccgcgtcaaactctgcgtcagttgaaaaccgaccgatacaggacatatatttaagcgacaattcttcagctcctgatgatatttcaaattgaatatctttggcgatttcttcaatacgcctaataaattcagctctgtaccttattatctccgcggaaacttgaataagtttttcattcataatttcaagcagcgtctcgtttggagagttcattttaagcaaagcatttttgctgtcaactacctttctcagagaactgagtgctgaaaaataatttgggcgcaattggcttataagcatatcaagatttcggcgtctgccccttggcccctctttaacaagacctaaaagctccggaccgaaatacaccacgttaaatttgccaagcagctcgctgttgcgctttattggaatatcattgtatatgatagttttacgcctgccgcgaaacatttcgatttcaaaaaaactatcctgagagtatgacgaaaattccatataaatatcggctttgtcttctccatgccttataagttcagaatccttattggttctatttgattttcccatagaaaacatgtgaaccgcttctaaaatattggttttcccctgggcattatctccgcatataacgtttattccgtcagaaaattcaatctcttcttcacaatagtttctgaaatttgttaacctgattttattggatttcataagcccgtctcttagccggcatttctaagtctgataggaagtatcatatacatataatcgttgccttcaacaggagtaattataagcggattgatactcttattaaacttcatcattatattatcatcacgcagaacgttaaacacatcctgaagatatctattgtaaaaaccaatctcaagcgcaacatcaggcggagtatcaacacttagattgtcatcaactgaaccggctgaagttgtacacgaaacatttatgtttccgtcagttatattaaatcttataggacctttaactacatcattcaaaattatcaacgaggctctttttacagaatcagcaatctgatgtgtaggacactcaagttccaattcaaatgaagttggaattatcctttcaaaattggtatagcttccttcaatcaatcgagtaaccagcttgcaggtttcaagcaggaatatagcatgtccgggtgccgcgattatctttatgtcctcgtctgaatcaccaattattctggcaagctcagttagagatttttcaggaattatcatttcttttggttcaaaatttccttccagagatacatttctctgcgctatcctatatccatctaaagcaaccattgagagcccgtccggcatgattttcagcagcgctcccatacgcgtagggtcattatctgttttagcggctgcaaagctcgtcatctctatcatgtttttaagaactcctccgggcagtgtgacagaatagtcttcgctaacctgaggcaggtccggaaactcatcaggagctataccgggtatttcaatttttgccttcccgctttttatgagagtaagatatttctcattagtttcaattgatatagttgagtcattaggagatgctaaaatttttccaaaaagtttagcgtcaataacaatttcgccgctctcttttacatcagcttcaattacagactcaattccaatttctaaatcgtttccgattattgtaacacggccgttttcctcggccctgatatatacgccttccaaaacggccaggctggaacgggacgaaactgcccttgaaacggtagaaaccgctgagttaagtacgtctctgtcacatacaaatttcatatgaaaaatcctttcatttcactagttttatatctttataattataccataaaaacttttctgacgcaacagttttttgaaaagttttaccactatttcaactccgaaatcacggcggttataagcaatatagaaccgatttaatcataagacggctcttgacttataaaaggatatgctgatataatcattatataaaattggttggtgaaatttatgaaaattttaataattgacatggatagagaaatggcacaatacgaaagcgactgtcttaaaacattcagatatgattgcgatatttctgaaagcggacaggaaggactgaaaatggcagtcgataacgactattgctgtataattcttgaaacagatttaaacggtgccattgacggttttttaatatgttcccaaataagaaaacaaaagaatatacctataatctttatttcagattgcggcaacgaatccgcaaaaatacgcgcatttggtgttggagcagacgattatatcacaaaacctttttctatttcagaaatggttgccagagtaaacgggcatataacaagatacctttctatcattgaagaatttgacaaaaaaagcgcaagagtaatagaaattcgagaccttaaaatagataaggattctcacagagtatttatcggcggaaacgagataataatgcctgttaaagaatatgaactcttgctttttttagccgaaaatcccaatattgtgtttagcaaagaacatttgttcgaccgcgtatggggaattgacgcaatgggcgatacttctactgttactgtccatatccagcgcataagagaaaaaattgaaagcgcaagcagcgaaacttatatagaaactgtttggggcgccggttataggctctcagacagcaagtaacagttgtaagatttttactttattctatttaatttaacatgaaaatttatccaaaataacattgacgtttttggaaataatgatataataagagcaaagaaaatggtgaaaaatttcacaattgataaaattattggaggtgcattatgaaatacactgatgtgacagtttcagactcaatcaaatatattggtgtaaacgactatgacctggacttatttgagggtcaatatataataccaaatggagttgcgtataattcatatgttattttggatgacaaaataacgataatggatacagtggacagaagagcctgcggagaatggcttaataatctaaaagaaattttgggtgaaaagacacctgactatcttgttgttcagcatatggagccggaccatgctgccagcataaatatacttgccgatttataccctgatatgaaaattgtcggaaaccaaaagacgttcggtatgataaatcaattctttgatttagatttgggagacggcagaaaagttatagtatctgagggggacaaacttgaacttggaaatcattgtttaaactttgttatggctcctatggtgcactggcctgaagttatgctctcatatgaaagcacagaaaaaatcttgttttcggctgacgctttcggaaaattcggcacacttgatacagatgaagaatgggactgcgaagcaagacgatattactttaatattgtaggtaaatatggcgcacaagtgcaaacagtattaaaaaaggcttcaagtcttgatataaaaaccatttgtccgcttcacggacctatactaaatgaaaatttggatcactatattagtctttatgacacctggagcagctataaggcagaggataaaggagtttttatagcatacgcctcaatttatggaaatactaaacaggctgtagaaaaactggctgaaatactcaccgaaaaaggtgttgaaacagtaaaaatcactgacctcgcaagagaagattgggccgaagctattgaagacgctttcagatatgacagaatggtagttgcatctcccacatatgacggcggaatatttactccggttcttgaatttttgcagcacattaactcaaaaatgtaccagaacagaaaagtaggcatcatcgaaaacggttcatgggcgccaatggcaggaaagaaaataaaagaatttttgaccggaatgaaaaatatagaaatagttgaaccaacggtcactgttaaatcagctatgaaacaaaacacgataaaagagcttgaatcattagcagacagtctgctttaaaaatttatcacttgttaaataataaagtgccgcagtacagttaatttgtaccgcggcactaagtttttaagtaaaaaatcctactcttcctcaggatatttaaatccccaatcttcccgaagtccggtcataatatccataacatcaaccgtaagatttaaataagtatcattgcctttcccaagtattgcatcttccatatcttctatttcataaaacagcgctttgtctttccttccggctgaaactgtttctgtcttttcagtgtctatataagttatctgagctgtttgcggtctttgataatcatccaattctatatacgctttttcacatgttataaaagctcgttttggaagtctagcatgaagagacaccgttaacgtggctgctaagtcttcaccattcattaataatattccttctgtttcatcaacaccggactcaaccatctgtaccccagaagaaaatcctgtaggtttgcacggcataaacaaacgggcaaaggacagcgcataaacgccaatatcaagaagggctcctccggctagcgatttactaaaaaatctgctgttcatatcatgctctctaaaactgccgtggtatacatgaataagattaacctttccgaacacaccggctcttaccatctcgctaagttttttatacagcggcatatgataaatagtcattgcttccgccagcactaaattatttttttctgccaaaagcacggcttgatttaattcagagctatttaaagttattgccttttcacaaagcacatgctttccattttccagagcttccattattgcctcaaaatgtttattatgcggcgtcgctatataaacagcgtccacattatcgtcataaaacatttcatgataatcgtcataaactttatctatattatgctttttagcaaactcaatgaccttttctttcgtgcggctgcctacagaatatacttttctgccctcatctaaaaaagcgtctgccatgtcccctgcaatccagccggatcccaaaattgcccaatttaattctctattcatatcttcctcctaagtataaattataatatcaattttaccaaaattattttaattattcccaaataaatttaacacaatataaacatagtaattgttataaatcacatagtgccgcagaaaggaactgaaaattgcagtccctagctgcggcacatttaatttttaattttcattactgcttaccgtttgacttaacggcgtcaaattatttatattatcccaaataaacactttaacttcattgccggcaccggaaacgtggttaacagtatagggaaccgtctctccaatagatacaccgtttgataaaactctcgtatccatatactgtataacgcctttatcgttatattcagcaactataataaggttatcgccgctggtctcagcattttttaccacattaaatgaaatagtctcgccttcgacatttaaattattaatgctgtaggtttgaacaggctctttctctacatattcagcaaaagcagcttttctaaatctagcttttgaaccatccatatagaaataatatacatcgccttttttcaccggcaatgaataccgaatcggcaaattagcttcttttacattaagcgagtaagtcgactcttttgtataatccgtaacaccggcttttgtaacatagaaagttttgtcctgcagagcagtcaaataaatagtaaatactccgtcttcaggcgcagtaaattccattgcactgccttttccttttccgttttcatatccgccgcctatatttttatctgtaatagcaaaattcgatataaatccatcatcaaaaacagctatatcctgcataggacgtccaaacggaatcattcctaccaatcccggcataaactcggtgcctgccggtttattaatatcagcctcagttgcaatccactctgaaacaaaggttgtttcaggagacgggctaacgttaggatccggtgtttcaacagccggcgggacgatagtaggctgaggaagcgcttcatcataagccgtatctctaacataactgccgtctgccaaagcatttgcatattcttcaatatacatatagcctgttgacggattgattttaacagcatcagatgaactgtttttatctaacccattcttatcttcatattcatttggaattccgtccaaatcactatccttcgacataattccgccatccaaagttggatatcctccaacatcactcggcttatcaataattttaccggtacggtttttaacatcattcgtaactcttgtatcaacgctgtctctgattatacttgctcctgcgctttcaagcactgatttataggcgtcctctgcggtttcagtattaaccgggtattcgttctcatatctgaaatgaactattttttctgcgtctgtaatattagacttcgaccatattccataatggttagcgttactgtctttatcaacacccttggtattgtctgaagtaactgaagaattttcatcaacatagtttccgtcaacatacacgtctgttccccagccctcaacacctgttccggcagctatatatgaactgtctgcagttgaagcactaatattgtatatcctgctcttatgttttccagtgcttggaccatacttgtaataacagttaataaaattagctgccattccatcctcgccgccgtaagcggaatttccgccccagttgtatacaacattgtttctcatatcggtaagagtcatatttaaagtaacatcattatatgcgtctttatttgaacccctgtcaagacgagggttacggctgtcatggtgagcgagaagattatggtggaagcttgcatttttacctccccatataccgccgtatccatgtgcgcctttgtcatgaagtgagttctttaaactttctgatataatacaccactgcatagtaaagttttcattttgatagaaagaaacacattcatccgtgctccagctcatagagcaatggtctattataacattattaattcctctgccgcccaaagtatcatcctcaatacctccgtctacgcccatacggaaacgcagataacgcataataatattgttccccgtcatatacacgttaaaatctctaaagcagattccatcccccggcgcggtctgacccaaaatggtaagattatcattgtatatagtaagcgttctgctcaaatttatagttccgcccacatcaaatacaataatacggtcaggttgagaaactgcgtctctgaatgtaccaaagctcccgtcatcagcaagacttgtcacatgataaacctcacgattttctgaacttcttgctcccgttgcccacataccgccgccttcagcgcccggaaaagccggcaatgagtttgtttcagcaaacgttgccgggcaatataccgcagaaataagcattgcagcaagtacagcccaaaatacaccttttaattttttcaagttcatttcttatacccttcttccttatttttttgaaccctaaatgaattatacaacattactgtaaaatagtcaatcgcaacaaccaatttacagtaataataaacaaatatacattattaaacaacaaacccttcgccttaacaaaaacttatgttaaaaacccccgggaattatcccgggggtctgtctaatatctcaattcctcttctattttaagcaaacgattatacttctgaacactctcacctcttgacaaagcaccggcctttatatacttagcattcacagccacggcaatgtcagctatagttgtatcccctgtctctccgcttctgttggaaattattggagtatatccattagttttggcaagttcaatagttcccaaagtttccgttaaagtacctatttggtttggctttattataatagaattggcaatttttaaatccaatcctttttttaatcttaatttgtcagtaacaaaaagattatcaccaaccagctttattttatccccaagcttgtcagtcatcacttcccagccctcaaaatcatcctcagccatcccgtcttctatagacagtatcggatactttcggcagtaatcattccacattttgaccatatcttcacgcgtcagcattctgttctgcttccaaaaataatactgtccttcctctccaacagctttagcttcgttatacatctcgccggccgccgcgtcaatcgcaaccgcaaaatgttccccggtgcgataaccggatttttgtatcgctcttactatcagccttatagcctcttcatccccggaaagattaggcacatatcctccaacgtcactaaatgaacctgaaagaccgctatccctcaacaattctttcaaagtatgagaaacctgagcacaccacatgagcccctgcttgaaactctcagcaccaataggagcaatcataaactcctgaaaactgagagaattatctgcatgccgtccgccgcttattacattaaccaaaggtaccggcattttctttccgccgattccgccgatatactggtatagccccacgcctaatgcatttgctgccgcatgagcgcaagcgagcgaaacgcttaaaattgcatttgaacccaattttgatttattagaagttccgtctaagcttatcatctttctatcgatggcttcctggtctataacattcattcctgtcagtttttctgcaagatgttcgtttacaaccttaaccgctttgagcacaccgtttcccatgtacctggtttggtctccgtcacgcagttcgtgagcttcatactgtccaggtgatgttactgccggcactgaggctcgtccgacgtttccgtcatctgtatatacctccgtctcaatcgtcggtataccgcgtgaatccaatatttcatgagcaaatatatcctctataccgatataagatttcataagctctcacaaatcccttctgtagtattatatctgcattatatggctttattttttgtccattcaattctaagactataccaaaagcaacaaagtacctgctgttatcaaaataagacccaaccaggattttgcactgagcttttcctttaatacgatataagaaaaagcaatcgtaacaattatactcagtttgtcaatcggaaccacaacacctgcctgccctgtcttgagtgccctataataacacagccaagacgcacctgtagaaattcccgacaatatcaaaaacagcatcgaatgtctgtcaatatgtttcagcgtatttttctttcccgttacaaaaacaatcatccatgccataatcaaaacaacaacagtacgtatagccgttccaagagtggaatcaatcccttcaatacctaccttgcccaagatagcggtcaaagaggcaaacactgccgacataacagcaagcaccagccacttataacctttaacctcagttgtgtttttttgtatattaagcatcaaatacgttccaatggcaatcagcaccattgaaataactttataaactcctaaaggttctcccaaaagtataaacgcaagcagcattgttaaaacagtgcttgatttatctattggagcaaccttatttacgtcacctagctgaagagctttgaaataacacagccaggatgctccggttgcaagacctgagagaatcaaaaacgtccatgtttttgcagatattggacctatttcgctgccgctgacgaacaccataacccaggaaaacaccagaactacaacggttctgaccgccgtagccgcgtcgctgtctacatcttttattccgcactttgcaagaacagctgttattcctgcaaagaatgcggaaccaaacgcaaacaatatccacatatacgtttcacctttctatagttaaatgtatgtataagatgaatctgctaaaatatcttaattactttgataaagactcccctgcctcttcaagcagctttggtatatcaaaattctgcgggcagtgactgacgcaatttctgcatttaacgcaagcgtccgccttatattccatatctaaatactttttgctgggctcatcctcccaggtataagttaaagcctgctcattataaagtttaaaaatctcaggtatatcaatattagccggacatggcatacagtatctgcatcctgtgcactgcaccctagcaccctggttaaaaatgtctccggcttccattattctctttttttcatcctcactgagcataccaacatcactgcgtgaagcatactttatattgtctttgagctgttccatacttcccattccgctgagcagtattgatattttcttcatatcccataaaaagtcaagagcattctcaactattgttcttccctccggcagaatttttgatacgtgttccggcagaacaacaagcttgccgccttttaaaggttccataataaccacactgaggccgttatccgacgcgtatttaagcccctcaagtccagcctgaaaatttgacgctgcgtcagcgtagttcagctgtatctgacagaactcaaacgctccgtctgagctgtctattatacgtttgaaagtttcaagatcgtcatgaaacgaaaaacctaagtggcgaattctgccctgttttttaaattccttgacatggtttaaaacatccaagtcagctattttaccgtcccaaaattcctttgtcatattatggagcaggaaaaaatcaaaatagtcggtttgcactttatttagctgggtttgaaaaaccttctctacgtctccgtccgcgtttatgttccacggcggaagcttatctgcaataaaaattctatctcttatcccaagttcttttattactttacccaactcaatttcactcgtgccgttatggtaaccaaacgctgtatcaaaatagtttatcccattttttacagaataatcagtcatctccaaaaacgcttgttcatcaattatattttcgccgtctttctttacggtcggaaggcgcatacagcctagtcccaatacagaaactttttctccgcacatgtctctatatttcataacaccaaatcctttttttaaatttatttttaaatttttctattgaggaaattataacataaatgttccatatttgcaaaatatattttatctgcccaaatttgatatctgcttgaatattattctaaacgttgcaaatactttatacaaaacaaattttaattcagagttccgaaggaggcaggccaatgcgtaacaataaagtggaaatctgcggcgttaatacctcaaagctcccggttttgacagcaaaagaaaaacgcgagctttttgaaaagataaaacagggtgatgccgaagcccgtcaaaaatttatctatggaaatcttcggctggtgctgagcatactgaaacggtttaataaccgaaatgaaaatattgacgacctttttcaaatcggctgtatcggattgataaaagcagttgaaaattttgacacaggccacaatgttcagttcagcacctatgcggttccaatgataatcggcgaaataagaaggtatctcagggacaacaacagtatcagagtcagccgttctatccgcgatacagcatataaagcgctttcagtcaaagagagactaaccaatcaaaacgggaaggaacccggcatacatgagatagcaaaagagcttgatataacgccggaggaagtatccgtggctttggacgccataatggatccggtatctatgcaggagcctgtctatcatgatggaaccgacgctgtgtttataatggaccaaattaaagacgaaaaaaatattgatgaatcatggcttgaaagcatttcactaaaagaagccataaaccgtttgaatgagcgtgaacagcacatcattaatcttaggttttttcagggaaaaacccagatggaagttgctgatgaaataggaatttcacaggctcaggtatctcggttggaaaaaaacgctctggcaaatatgaaaaagaatttgtaaaaataatcaggaggtcaaagtatgaataaaataatcaaatgtataaacataaaaaatctagcaaaaattttggtaatcgctctgcttataagcacttgcagcgttgttgtgcctgtctcagtttcagccgaagatatgggaacccaggtagacacagacgtatccacgtcacttgtcagcggaaaatcaggtatattgatggagccaagctctggcacagtcctatatgagttcaatccggatgaaagactacagatagccagcgttacaaaaaccatgacaatgctgctaatatttgacgctttagagagcggaaaaataagctattccgatatggtaagcactagcgagcacgcagcatctatgggcggttcacaagtatttttggagcctggagagcagatgagcgttgacgatatgcttaaggctatagcaatatcttcaggaaatgacgcggctgtggcaatggctgagtttgttgccggaagtgaggacgcctttgtggaaatgatgaataaaaaagctgcggcattaggctgtgaaaacacacacttttgcaactgcaatggtcttgatgaacctgatgaccactacagcagcgccagagacgttgcaaaaatatcatgcgctctgattaagcacagcgacgtctttaaatataccacaacctggatggacacattgaggggcggaagttttggtctgtccaacacaaataagctattaaaatcctacagcggcgcaaacggtttaaaaaccgggtcaacagaaaaagcaaagtattgcctttccgcatcggcagaaagaaacggtcttaacttagttgcagttgtattgggggcgccaagcaccaaagaacgtttcggaagcgctgcaagacttcttgattatggttttgcaaactattcagttgtaaacggcgaacaaatagttggggagataccaaacctcaccgttcagagcggaacgcaggacaccgttcccgtaacgcttatgggcaacaccaattatatcgtaaaaaaaggcaatgaagacaaagttgaaacagaaataaacatggactcaatctgtaccgctccaatacaaaaagaccaggttgtcggcaacgttgtctttaaagtggacgggcaaaaaatcggtgaaaataatatagtgtctatgacagaggtaaacaagattaatctttgggaactgtttttcaaaaacatgaaaaagtattttagcatttaacacagcaaaaaatacgcgcggaattaattccgcgcgtatttttatttggtcttaattctctgagcgattatacttcatctcattaaattcctgacgggttataagtacctgccgcggttttgttccctcatatggacctattatcttcttttcctccatttggtctataagttttgccgcacgctgatagcccattttgaatttcctttgaaacatagcaacggacgcctgcccattctccaaaacgagctcaacagcctccaaaaacatatcgtcagttcttcctccgcttccatcgcttccgctgtgagaagatgaagaactgctcccggcttcaaggtcagccgcaaccctttcatgttctttttctatatgctctataacctcttcatcatactctgcctcatattgcccttttataaagtctacaagagcctctatctcactgtctgaaacaaagttgccctgaacacgcagcggtttcatagaacccctgggagagtataacatatctccttttccaagcagcttctccgctcctgctgaatctattatagttcggctgtctatctgcgaacttacagcgaacgctattcttgagggaatattggcctttataacaccggtaattacgtttaccgacggtctttgagttgcgataaccaaatacattccggcggctctggccaaagccgcaagacggtttatcgcttcctctacctcgctctttgcaacattcatcaaatcggcaagctcgtcaataattataacaatttccggcagttttgcatccggctcttcacgctcttccatcagtttattataacctttcagatttcttactttgttatctttcaaaagattatacctgttctgcatctccacaacagcccaattaagagccccggcggcatgttttgggtcggttaccacaggaatcagcaagtgcggtatgccattatataccccaagctcaaccatctttgggtctaccattatcattttaacctcatcaggtttcgatttatacaaaatacttgttataagcgaattgatgcagaccgacttacctgagccggtagcgcctgcaattaagatatgcgggaaattcgctatatcggcaataacacagtttccgcttatatccttacccaaagcaactgtagtctttgatttttttcttttaaattcagtggtgtcaagcacctctcgaatcggaaccggtgaaggattcgaatttggtatttctattcctatagctgatttcccgggtatcggcgcctcaattctgacccccggagccgcaagacttaaagcaatatcatcagaaagccccgttatttttgaaactttaacaccaaatcccggctgcagttcaaacctggtaacagacggcccctgggtaatgtttataatctttgcttccaccttaaaactgcttaaagtatcaagcagacgatttgccttttcttccagctcatactttatttcggcttttgtttttttatttggcttcggttctgccaaaaggctgtacggaggcagcttataccttatcaatttaggcacggtgcttttttcctcaatttccgcagctattttttgctccggggtttgaggttcagcgtcttccacaagcattttacgtcccttagtcacagcttcatcgagcggaactccgctgtctaaagcttttttagtcattgggtccagcttgtcctgaagtttagcttcgcttggcggttcaaaatcgtcagggtcattgctgggtatagaaccgtcttctttcggcatatttgtaagcgctccggtcttgctggtatccaaaaatgatggaacggttacatcatcaaatccgtgaccggcctcatctcctacttcactcaacgtccctgctgttataccgtcaatatcaaacggcaggtcatcaatactgaatttatgctgtgacgaactaataccggtatcctctatggaggtttttaagttattgctgagttctgcatcctcttcaaacataaatctctgaggttttgtctctgttggcggaggaataaattttttgtcatttagttctatatcgataggggaactattcttctttgcagaaccttttcttgattttctcaccggtttatcatcaaaatcggtcgtatgtctttgttcatactcataatcagtatttaaagcgtcatatttatttctctgctcttttcttttttctcttccggtctttatttttccaaaaacacgtttcaaaaatgacgtcttttttgattcttggaattcaccgtcatcatagtaataatcatcaagaaccggctcaatttcgacctcacgattagccctgttttttatactattaccgctgtttctaaaaaagtttaaaatttttctgaaaacaccttcaattgatatccctgttagaattataaacagaaccagcacagctgaagctgaaaaaacccaggcgcccatatatccaataagcaaaactgtcagtttacagagaaaaccgcccagtattccgccgccgttgccgtttataccgttttcatacagcgagtttaaattaccaaaaaaaccgccctcaacaaatcctgtatcgcctaaagcaagagcatatatcataccggaacaaatcatcagtcccaacagaacccaccacttgtagagtgaatcccctgtctttttatcaaaaaagcagttaatgcccgcaagcagaaaatatataaaaaacactcctgaagcggcgccaaataacccatagcaaacatttctgataaaagttcctactatacctgctgcactgagataaaatgcgcatgcaaagaaaatgcccagagtcataagcaatattccctgaacttcgcttgatagaacttttgtttttggctgtcttgcggtcacatcagaagctttaacagccctttgggttcccgcttttcttgtgcctgacgcacttgaacgggttcctgtctttgacctggcacgggaatttgcagaactgcccgaagacgttgtcttcttttttgtatttgtagtcttagtcttggttgccgccatttaaactcccctcataatctttatattttaaaaactttatctaaagttcattgtatcataaaacttctatatataaaaaacactgcacagacgtcaatacgccttataaattatatcataaaaaggctcctttgtgtgttacggtttcatttcaatttagtctaaattagtcgcattattactcttatgactgcaatatagccagttatttatttttaattagtttattgtttaagataaacaaaattgacaataccgattcaataaaaatatcctcatgaatgtctaagattcataaggataatattatactttttttctgcggaatgttatggccgcttttttagcttgagaatgttggtgtctgcgcaatattctatacacctttccatttttcctgagccttgctcctgtttgatgaaaactgaaatctaccccagcttcaatacattggtttctaatatcaagcacccaatcatagtcgcatacccgggcttcattccccgattctccacctactataacttcacttattttttcaggtaacaaatactcttttaaatcaataggacctaacaggggttcacatattatataccgttgggcaatcggaaaagataaaaatacaggcaggcgtttatccgccatctcctggttttcacaagtacaccctatagctacattatcatagccgtctccccaatcatcaggaacgacatcagccagcctatttatacgctttgttataaatagaaaatttaaatcaaacctttctcttatcatgtcccaggcttcatctctccatttgtcagcttcatcaattaaaaaatcagatgtgaagcataaacccacttccgctcctgattccagcttataactgccatatttatctctgctgacagggcggttaaaacttgatgtttttctgaccgtattgctgtcaatatctctcccggaatccgaacggaacatgtagcagttggcacacccggcgcttattttatgacagccgtgccacgggttccatgtatattttgtcacattaaaacagcctccttcagcacctgtgctataggctctcttataactaaatcagccgttttgtcagcaggagtcaccgacttatttatcagaacaattttatcccctgtaaactcatgtatcaagccggccgccggatatactccgagagatgttcctccgataatcaaaacgtctgcttttctaaggctttttatagagccattaagaatttcagggttgagtccttcttcgtataaaacaacatcaggccgcactatacctccgcataaatcacatgttggtattccttctgtgcctattatcttatcaagtccatacttctccccacactttaaacagtaattcctgtgtatgctcccatgcagttcaaaaacattcttgcttcctgccatttgatgaagtccatcaatattttgagttataacacacgagagtttgccggacttctccaactcagccaacgcaatgtgagctttgtttggcttagcttcacaatatatcattttgtctcggtaaaaacggtaaaattcctctgtgttgtacttaaaaaatgtatgactgactatttgctcgggaggatatttatatttctgattataaagcccgtcgctgcttctaaagtcaggtataccgctctcagtcgatacgcctgctcctccaaaaaatactatattttttgccctctcaattatttcctttaataaaactgtatcactattcataaaaacagcctccaaattaaatatataaaaatttgcttatgaatgttttaaactacaaaagataggcaaaaattttttgatcaggctacatagactgaataaaaatgttaaggtcatatatcataataaatattaatttgtatactcaaagcagatgaaatatgcagcgtaagacgctcagtatcggaaaaatttattaataaaaagtattatgacaatcttttttaagtatgttcacgctccgagtgatatggcagctcacctaacgaagtgtgcttacgcacactctaccgatgttcgctaaaaaaccttaattttttgttcagtttattatagcctatcggtactatttcgaacagaataaatcggatttgaatcaaaacagcatataagtttattatcctgcagctgtattatcatggttattatttataataaacaagccggcacacaatataaatcaattatatttcttagattgtatatttttctaaaagaaaaagggtaacgccagtaggcagcgttgcccaattccataataaaattttaatatttaaggtttcaaatcatttaacagctttctgagctgataataagatgatacactataaaaataatttcgtcaatagtctgaaacacaattgtaataaatattttcatctttgttaaaaatatacatatgtgtatattgctaatttatatggtttttatataacttcgcaatataaagaaaactatataaatttataacaatagactatacaatatgtttaaataataagaatctctgtataaatatttctaagaaattctaaatttatttataactaacttttgttggcttaaacaactattgatatatattttataatatgctataatctgtatggaaaataatgctatattaggaggatgtgtaatgaaaaaaactttaagaattttatgctgtgtattggctgccgccgcaatgctgtgtcttgcatcatgcggttcggaccaaaataactcggcaaaagcaaaaaacgaacccaccaataccccgacgcaagctaaaaaggctgaaaacagtcctgttcccgtaacaggagaactgtcgcaaggttcttgcaaagttctcttcactatgagcgacggacaaactttcactgttcagtgtgaacctgagtatgctcctgaaaccgttgaaaactttttaagccttgttaattcaggattttatgacggattaacattccacagagttcttgacaactttgtagctcaaggcggagacccaaacggaaacggtaccggcggaagtcaaactaagatacacggggaattttctgaaaatggttttactcaaaacacgctgacgcacaaaagaggaagcgtagcaatggcaagatccagcgctccggattccgcgtccagccagttctatatttgctatactgaccttcccagcctggacggaaaatatgcagtattcggcactgtaaccgagggaatggaagttattgacagtttcttaagcataaccagagactcatcgggaatgccgtcaacacctataactattgaaagcgcaaaaatagttgactaatatatacaaaaaatctcccaagtaatatatcttcaaacgaactaaatcttgaagtatatattataatgggagattttttaatgcgaaaaactttattttcttattttaatgaagtttacatattaattcagtataactttttaatccatttccagtgattatcttctttacagtcttcaaacatcaactcattaatattttcatcatcgaacacttttataagttcataaaaatcgtctactgtttcatatgaagacaaattcttacgctctgccaaaaaaacttctccttcttcagaggaacaaagttcgccttcaaattcattcgttttaaagagcaacacaatatatctttcgtcatcttctgtttgaaattgctttacaccgcaaattctaatatttttaatttttagacctgtctcttcaaatacttctctttctattccttttacaaaagactcttttttctcaatatgtcctcccggaaatgtaacgcccttccaatcttctttaatcctatcctgcaaaaggattttatcgttgtcataaaccatacaaagggcagtaaccacaacactttcacttcttgacataataaatctcctaagacaaccaatattaaaagttaattttatccaagattattccgcgtcaattttaaaccagtcaaaatcagccggtattctttttcccgaatccgttccggcaaatactcctaccattgttccggtatgccgttttctatctgttggaactccttcatcgcacaaaaagatacacggattaacggttcctgcctcaatatagttttcaccgtccatactatatgaaaacgttcgtttttgcccgtcaacatcaacccgaagatttatccatccatcaggaatttctgttttgttcaccagttcctcgccttggtttcggttaataaccagttcaagtatcctctttccttcagacatggctatattaaatctgatatatgtagcagtgctgtaataacaggttaaaccggcccacgcaccatcatccgggtcaaaattcatctttgtttccgctctgtatttaaactctgcttctctatgaaccaatgtgttctttgcctttagctcactcaaattcccgtcagtggtataaagcctcagacagcattctttctccttatttagagaaatataatcatagtccggatttctgacaaactcccattcaagatttaaactatcatgatcaaaatcatcaaaaaaactttttgattcgcctttaaattcaggtaagtccggtccgttttgtatctcgctggggcctttcccctcatttattagaaaccagccgtcatcagtccagcgaacgggatccaaagctgtctctcgtcccaaagtcgtataatttccttcgtttcgtcttccgcaaagataataagcccaccagtcgccgttttgatcttcaacaagcttgccgtgaccggcgcgctgtattaatttttccggatctttctgtctcattacaggattatacgggcaattttcatactcaccgaataattctgttgacctagctatattgataccatgtccataacctgttcctccctctgcggctatcgcataatagtaaccattatgcttcataatatgggggccttcagaacaacgctctccggttccattccaaacaactttaggaccgtctattatctcagtgcagtcttcattaagttcccaagccgtagcggctctggcagttatcatatactttcttccgtcatcatcaaaaaacaacgaaggatctatcgaatttgcatttagccaaaccggctttgtataaggtccctccggagttgtggatttcataataagctgctgtctgctgggacgagttttttcttctccgctgtcatttagccgcattgtggcaattatataaaaagttccatcattataaaaaatatctggcgcccaaataccatgcgagtctttaattccgcttaaatcaagataagatggatctgtgatagcgtgtcctattgtttcccaatgtatcatatctttagaatgtgaaatgggtatacatggaaaatactgaaatgaagagttaaccatataaaaatcttcacctactcgtataaccgacgggtcaggataaaagcctcttcgaaccggattactgtaattcataacaacctccaaaatttacggggttatccccttttattggcaaatagtatatcatatttatacataatattcaactattttactgcctattaataaatttattataaaatattttttgtttaaacagtcggttaattatactagtaaccataaccatttcaaactaataactgatgattttctcaaaataccactattgcactttaaaccaaaaagacagtgattatcagatcatttttaaatcgtttaatataaaccataaacggccggaaaccgcatacaaccggtctcgtctcacatttttgctttacaaggctgtttttatgctgccatgcgcaaatcggttcgtcaccttacaaaaatattattaggagaaatggtgcataatcatcaagggtcgagaaaaaattacttaatgtaggttgaggtctttctcgtgataggttttaccgtcttttgtcaagcaatgccactgttagtatataaaattaaaaaagtatttataagttaaataatacgtccgcctataaacataaaaaataaataaggagtgcttcattttataaaaatacaaattgtttatttttactttaaataactcaccaaaaacagacctctctgcaatacccagaattctatttaaggtcactatcacaaccatttcaaaacacttatcaaactttcataatcctaataaacaatatatatttctttattgttttaaattctccatcagccaattcttttattcaaatggtttcaaaatacagcgtataactatcgcaattatttatttttatataaaaacagccgcagacaaaatgcctgcggctgtataaattcatatatctatttatcttttctgcgtaaaaataccggaacatctatcccgtcgtcttcgccaaccttgctgaataaattagatgacggcgccggttcaaatgtcggactaggtggcgtataactaggcgccggctgtggcggagcctgattatatgacggagcactctgtgtgctgctcaaattccccattccatttaaaaagcttgaaaacggattggtttcttcctctttctccggctgacctggaacattccccttaaatcctgttgcgataactgtgataacaagttcatcgcctaagttttcatctataatagcaccgataatgatattagcatcagaatcagcagcctcttcaaccagttcagcagccgtcttaacttccaaaattccaagatccggtccgcctgtaacgtttaatataacgcccttagcgccttctatagttgtttcaagcaacggactatgtatagctttcttagcggcttcttccgctctgttttcaccggaagctcgtccgatacccatatgtgcgaaacctgtatccttcattattgtcttgatatcagcaaagtcaagactgataagccccggccttgaaatcaaatcagatataccctgaacgccttgtctcaaaatatcatcagccattttaaacgactcggttagaggagttctgttctcagcaacttcaagcagcttatcatttggtataacaacaagagtatcaacagcatgcataagattggtaataccaatatcactattctgctgccttttctttccctcaaaccagaaaggctttgttactataccaactgtcaaaatgccctcatctttagcaatctttgccacgataggagcagcacccgtaccggtacctccgcccattccggctgtaacaaataccatgtcagccccttgaactgctttctttatatcctcaacgctttcttcagcggccttctgaccaacctcaggaaccgcgccagcgccaagaccttttgttatcttttcgccaatctgtattttctgtgacgcctgcgacagagttaagtcctgcttatccgtattcacggcgacgaattcaacacatttaacgtcggcctcaaccattctattaacagcgttattaccaccgccgccgacaccaataacttttattttggcggggtttgtagcttctgtatcaaactggaacacttcatttcctcctctgttgtttataagaactcgcaattatctactataaataataactctattataccatgaaaataaaatttgtaaatagaaattttcaaactttctaaaaaaatattacgatgttgtaacaaaagtaataaaacggtatatttaactgtttgattattgtaaaaaacgacaacaccgacatatgttgatagttttaagtcctagaaactgcgctgttttcactattttgcgacacctctaaacgataccgcggataaaaaaattgtaaaataaaaatgtaaaatgtacttgacattttttaataatggttgtataatacaaatagagagatggaaagctagctttactttttataaaggagggatagaatgaaaaatactcttgagacgctcagaaaagaaaacggcataagtcaggaagaattggctgacgctgtaagggtgtcccgtcagacaatatgttcgcttgaaaacgggcggtataatccatcgatttttttggcatttagacttgcggatttttttaaagttaaaatagaagatatattcttatatgagggggaataactatgaaagcaataaaaaataaaataatctatttaatagttgttggtattatcggaatctcactgtttataacaggaatagtccgcgacggcaatactatagtcggttttggcgcagctctaacagctgtatcaatactgaaagtgattcaatacgcaattatattaagtaatcctgaaaaacgcaaaaaacttgaaataaatcaaaatgaagaaagatacgtaatgattgctcataagagcgggtaccttacgcttatgcttacgttaatcgctgaagccgctgcagcaatcacattaatgataattggcaactcactctatgagttcgtttgcacaattatggcagctcagtctattatatatctgattacttattatattctttcaagaaaatattaacacttagccataaataaattattaaattatatattttaaatgcgccctaaaacatagacaaaaacatctattgttacctaggacgcattttcagctttttcttttatctacaataattatctaaataatctatatttaaaatatttatatcttctatttctaaaacttaaagcgataatcttagtcatattatataccgattatttccatatctgcggcagacttcatatcttttaaattatcccacacaaatgctcgaatttcctttatattagacctaatctcatccggtatttcaacattatagcttatattttcgccggggttagcctcaatttccactatattagcatctagtaatattccattattatcataatatcctattatcattacaccgttttgttttctatcggttatgttttcggctgcacaaactatgtctccttgaacatctcttttattaagaataagtttccatttattgtccggatcttttacctctgattctattcggtcatatacaaatgttactgtattactaccctcagcaagatgtatagtcacaatctccttttcgccgctaaatatatatccttttacaggcggagccgcaacctcctggacagtattataataaatactcggtatagtttgtgaatacaatatattattttcattctccctctccacacagttaattgtaaggctcgaaagagacggtgggaaaatttccatagttggagttggaattgacattagcgcatccggagttgaactgggttcaatggtcggtaccggctcaaaagttggaaccggcgtttcatatggtacatattcatactcaaatgtaaccgtcgtttccggatataatacttttatatttttaggcgaatcagtaatcaaattataattattaactgttggtgcttttatagttctctctcctataataacctcttttaaaatctgagtgtacaacacattattggcatccccagcatcaacgcattctataataaacgttgccgaactattcggcgcaaatatagtcctcggagcagggacgtccggatatgacatgcttctatttgtccctgacccagcttttcttgctgacggtttaaaacccaaatacacgccatcgttaacagcaatttcttgtgattcataagagcagcctttatcagtttcacaatcattcatatttgcttcgaatacacctaattacaatatgcaaatcggagcagcaattgttgatataactaagatattaaatttttcatttcaatcactaccatttatataataaaatatgatataaccgatggacattatagtataattcaataaataaaataacaaaaaatttatataaacatttacttgtactttagcaattatcacaaaacttatctcttatttcattgttgtttaacttattagttcgtgcaaaaatttctaaatacaattaaaatctttagattatatcaagtttattgatttgctttttataccacgtaaatatatatttttatatttcaatattctcacatatttttttaaaaatctgctatacgctaaactataaaagatgtatataacaaaaaatatttgtgacttgtatctatatcttataatattctaaaataaaaatataaaatgtcattttttaataatattattaagcttcaaaattataaatttttatttataaataactaatcacctacaactaaaaatgttttagtcatcaaattatttataaatataaattaaaatagagagactgcaagcagtctctcaaaataacagattattataattttttattattcataatcttggtattctatttcaatattatcgaagtaatattcaatcttatttgttgtatcagctcttttatccatataaatattgaaatagagttttgacaaatcataagacgtaggatagtttgggtttgctcccgtctcatcaggtgcagaaatcgtaaacgcctttgagtttaacatatatgttcctgcgtctcctgttttccaatccctgtcatacagcgttgttgttaccgtcttattttcaaggtctatatctccaactattctgtaccacttattagccatcttattattcttgtcaaactgagtattgtctccgttgattcttgctgtcgtagcgccgaagaaattaaactgtccccagcccttatatactccccagcgtacaaatctcgtagaatcctttacatccgcccccgcattgcttgtgcttgtggcaagatcaaagtatgaataatcactcggatagtaatcagtactttctagcaagaagtcataactgaacttaattgtctttgtattctttagtgttccgccgttcagcattgaagcaatatcaaaacttacacctgtcttagctgctacctttttatcgctgtcttttgttaccttatatactacattcccagcctctccaagattagcagtctcatttccggtaactgtatattttccagcgctgaatcctgtggcagaagttatttttggctcatatcccgcatctgcaaaatcaggacttgaaaccttcaaagacgccatttttttagcagtaatatcaactgtcacagcgtctccctttgcacctgtaactgactgtggatcctgaactatactatactcagtatttaaagaagagaaatatgctgtataagaaccaaccggtaaattttcagctgtataactctgtgaagtctgtcctgccggtataattacatctacagtttttataaccgcttctccatttttaaatataatatttattgtctgttctgcatcgcttacttttgaaagggtaactgtgccgcttacattaaacacattttcagtatcgcttgtcggcagaatactaaatttaatggatttttcagcgccaatttctttgtttccactctcccttacataaagtttaatagcggcgtcaattggctgttcgccaaatgcagggcgtataagcgtcacttttgtgccgtcagaacttacttttgcaaattcgctgacactttcccacttaaactcatacccgcttggagcctgaggaagcgcaatttcgtttgttgtgctatcgcttgtatcaatcgttgtagtattcaaaacattatttacgtctgcataagtgctgataagtcctgccggatcccaaccatcattacctaaagtaaaggtaaggggattatatctcagcattgtccactcattaagaatcgtacctttcgttcttcctgaagtatcgattttatttcctgagctatcaatgctattatactcaccaaatctagcattctccggcttattaccactcatcgcactccaaccagctgatccgataagctttccgccgccagaaccggcattgtcaataattgtattgatgtaatgtgctgccggaccgccatttgctccccatggtctcccgaaactcccggatgtggaagtttttgaaccggtaatatggcaattaaaaaacagatatccctctgtatctacagtgctgcttggtgctgttacagttgcagattcagcttgacttggaccagcatttgtataaagttcacaattatcaaatactgctgtagcactgccgcaaatataatctgtagttcccccgagcttacaattcttaaaatacattctgcccgaattaattcctatcgtgtcctgtgtagacataacttcacagtttaagaactgaaccttatcagcggaaacatgaatagccgcactacgctctcttgggcttccggttacgcctttataagttatttcttttctcgactgcaaaaatttgtttattgtatcatcgcttacaccattactaatttgttcatttatccattctactctgtggaagttaccattgttcggatcaggatcaacacctgctatgtcagtcaattcttcctgtgtatagtatctattataagagttttctaaaactaaatcttcagcaataaatgcagttgcgcccttatctactttaagcgatggaccccaatctttaggtccatatgctttaccgtcgcctataacacttggatcatagtaacctttttcattacagctgtcatatagtgaacccaaaccataataccatgtaagtttgacttctccatttgttcccggagctttcttcattgtaatataaggcgatttcacaactacctgttcacgatatgttcccggcataatgttaatatacgcacgattttcttcgtttgcaggcggatttgcttcaacggcagcgaccgcttcattaactgtcttataaatctttgcgtcagcatttgtttcctggcttgaatcaacagttattgtcttatccggatccgatgtaggtcctggtgttgccgttgccggtcccggcgtctctgtaggtacaagcggagcttcagacacaccaatttgaatgttatcaatacctaaagtatatgctcctgtctgacttccgcgcgtagaagtcgaaaccgttgtcggagccaattcaggtacagtacttacttttttagtgccgcttcctaaagtataagtccccttgagactataatcagaatctcctgtcttcaaatataccttaaccttattttctcctttgatatattcaagtttcaagccataccatgtgttagcgctgagtgtaattccagaaatttctgtatcctggggcttagtatccgttgcgcctttagagaagtaatcagatatttttaaaataccattatcacctgtcttaatttcaaacacacgaccgtcagttgctgtagtgtaagtattttcagtatttgcattattttcatcaaacactctcatcaatattgtatctttgtcagcggtactgttcataaagtctaaagaagctgtaaacatacctccgtccataggactgtcagctatatatctccaaccatcctgaccggcaccgccgtctgtaaacttaatataattatcgtcagctgtcctctcggcaatttcaggctgcaaaccgcctgctgcctcagaaccaaagataatttcaatattattaccattctcattttctataacatcgcctgcattatattttgttgatgcagcaacgttattaaagtcccatccaataaatgttcccggagccattgtcgggcctggttcctttgtcggttcaggggttgcagttgcaggagccggagcttccccggcttcctttactgcactgagaggtaccattgtatcagtgccgtcccaaatgtataatttaaccgttccattttcaggttttgtataatctactgtcagatttcctgctccgtcaacatcaaatacgcctgaatctgtcattgtattctcatcaatatatgaacctacaagcaatttagcctttggagctgtgctttcaccaatataattgatatcaacactgagctttccgtcttcgttgaaatatgcattagtaatctcataatcatacttagccggtgctgctgtaggaggagctgtcggctcagctgttggcttcggtgatgatgtagggtcgtcaggatttatatttttactatacgaacctactaaatttccggcatttcctaaatatttatcagtgctttctgaattatatggttcttgataatatgataaataaatcttatgttcaccatttataccatcaagattcttaagttctaactcattgtcccccgtagtgattaactgatttgctatctccgtaccactttttgagtctactgtaatcgaaacatatatattatcatctcttaccttaggcatattaagaactaatttagcaagtccgtcaaagttaaaatcatttacagcgtaaccgattttcacaccattacgtctgtacagccatccaatttccgtaccgtcattggcaggttttggaatcatatcactggctgatgaatcgcttgcaaaaaattctttaacatctttcggataataatacttatctccttcttctacatttgaaccaaaattattaattgtataagtctttccgtccacaaccgggaatgtaagaagatttctttgatcattaagagttcccgtaacttctgctccactttcatcatacactttagcttcagaagcatattttgtgcgtatacttatatcaccggttcttcttgagtggattttagcttcagtcggctttccgccgtcccagctcaaatcaacagtggcgtcttcacgtgtgttaaacccattaaatgaaccgctgctccacttttgtggaattgctggaagcaaatctatagcaccgtcatgactctgcaccagcatttctataatacctgcagttgcaccataatttccgtctatctggaagtttggatgctggtcaaataagttaggtgatgttctagttctaaacatttgttcaagcatatttgaagcggcctcgccgtcaagagctctcgcattcaaacttattctccaagcaagtccccacccttgaccgctgcctgcgccacgagctgatgttgccttttgaaacgccttaaatattttctgctcatttgtgtcctcactgtaagcgctcaaatgtgttccggggaacaactcccacagatgcgaacaatgtctatgacccgctgtattgctggcgtcatgtttattaataccttttgtttcaccggtaaacggacttgtaacgttaaatttaccctttcctgcatccacctcagtaaagtcaaaggttacgtctccgcgaacccattctttaataagacctgaaccgtcaataaggttcggtgcgagtttgcctttttcatctgctaagtatgatgatggcatctgctcatcaattttagcaagaagcgctgcattttcctcagttttgcccaaaatttcagaggccttctgaacagtatcataaaggtttctgataagctgtgtatccattgccggtcccggctgaactccgccctgctcaggagaacatgaagccgcagtgattaaatatcccgtctttggatcaacaaccaggaactgtgtaaagaacttagccgcacctaccatataaggatatacttctgccaaatacccagtatctttattaaagttataatactgccaagcatggtcaagaagccatattccacctgtaggccacagacctgctgtagcgttatcaatgggctgcgtgcccctccataaatcatagttatggtgcattacccaaggatctccgggctggtattggtcgtcgcctctttcattgtttataccatattgatattttgcagttatacttccgctttgtgcaagggcttcaaatgtgtctatcaaagtcttttctgtaccttgaagtccaaggggctgagctgcccaatagttcatttcagtatttatattaaccgtatactttccgctccaggaagcagaaagtgcagcattccacttaccggtcaggttaagcggctggctttcaggtatatctatttctccttcacctgatgcctgtctgccttcacgagcaccagctatcaataaatactttccgtaattaaattcaagagccgcaagctgattatccccatcgttatatgtagaatatacttttaagctgtttgcattaggtatgctgtttccgccgtttttcaagaaacctgattttccgttaacgtccttacggatacgcttttctgtaggtatattactgaaagcgttcttatcagtagaactgttttctaatgtcaaatcagtttttgaaaattgctctgcaaaatccgccaaatgtctttcctttatttggctgtaagtcttgctcttaacattgttagcatactttaagcagtcagccgcaggtttcgaattatcaagatttaaataatcaacataattcgtagctcctaccacatagatatcagcgctctttccgccgacaaccgacacagtagtattgtcatccgatactgagaactgtccgtcaccaaccaagaacatatgtgcttcaaacttaatagcatttacagttgcaggatcattattatctttacttccattatatacgcttgcaactaattttacctcattatcacttacttttgaatactcataatatccactctgattatgatatgaatgaagctgtgccgagaaattcaattccgcgtcagactcaacatgtgtagctacaacctgatcaggataacttgaaaaattttcgcgcttataatggtttccgtcataatcgtattcaacagtaaccattcccttttccatatccaaactctttgtataatttgtagccttagaatgatcctgaccaaaatcaagataaacttctacaaatgatttgtacgccctctgtcttgttggtttccccaagaaagtctgctcaaccatctcgtgcaaatcccatctgccttgagactctttctggttaaatccattgctgacatttaaagcttgatacgatatactcttgtttgcaaaatccgggaaactagttctaaacgcttcgtcaccaactgtaacatccttcgcgcctatttccgccggatttccattttcatcagcacctctgaagtatctccagtttccatcaacacttccgcttgtctgattttcagttgttattttagccgccttagacgtctgctcaatagtagtcaaagtattgccgctttcatctttaagagttccgtaaggagaaccatcccagcatgtatcctcattaatctgaataacttccttatcaataccaccggcaaccattccggccattctgccgtttcctattggataaaaattggtccacagaaattcagaatacgcccagctctgaagctttcccgactttgcatacggatttattacatcaatctcttttttctccgcattcggattgatttccgcagcattttgataaattccttgctctgccaaaacattttcgataggattatcagtccacattactgtttccggattaaatccattttcggacgccgcgctgctctctgcggctacgtccgtactgttaatagttgccgcagcagcagaaactgttccgagcgtcataactattgaaagtacaaatgctcctaacctttttaacatgtttttcccctcctgaaaatatatatttttattattttttctatcatgtatactttataataatattttttagtcaaaattaacagggccaattcactacaatttttatagggccaaaattgccacattatactagtattttatttatagttggattttaattaattttttgactttataactttaatatgtaaatacataaaaacattattataaacatttaatctattatgtttttactaattaaaattaaataaaaatttaatttatatctactaataaacaatataaaatttatttgcttttcaacacttaaatatatgtaatttattacatatgcaataagatttggaatgtatgataattattacgatttatttcaataaaaattttgtttttatataaacaagcttcctttatataaaattttaaattttaagatactacagctggcctgctatattctcaaattatataactatctttttaaaccgcttacaatctaagtaaaaatatttatatagaacatttttgaaataaatacaaataatacttttaatttttttaaacttgtcaataatatttaaaaaataaaatgaaatggattgattagtatgctggtaaccgtacttagaaccgccataatgtatgtatttgtcgtattatgtcttcgagtgatgggaaaacgtcaaattgccgaacttgagccgtcggaactcgtggtaacaattataatttccgaaattgccacagaccctatagttgaccccggtaaaccgtttgccacagcagcattagccatagctatcttattatttcttgaaatcatactctcatttattgcttataaacatattggtttcagaacattgctttatggaaaaccaagcacattcttcagcgacggaagaataaaccaaaacgaaatggagagccaaaggtttaatatgagcgaccttttagaggagattagaaacagcggagcaacttccttagatgatgtagaatacgttatcatggagacaaacggaaacgtaagcgttatattaaacacagagaacagaccggtaacgccgtccgatatgggaataaaggccgcacaaaccgaaataagttatattttaattgataacggcactctgattaaaaataatttagagcgtttgaaaatcagccggaaatgggttatggataaacttcacgaaaacggtcttaaaaagatttcccaagttttttatatgggagctgataaaagcggcaacgctgttgtcgtaaaaaagggcagggattcaaatgaatagggtaataatttcttcagtgatagtagttttggcggcaagtctgatttttttccattttcaaaaggtaaacactcttgataaaacagtagattcatcttatgacactattatggaagcatatcacaatgacgactatgataaaataactgatgaattaaataaaataaaacaatcatgggatgaagtgcagacctgggttggtatgactattgattcagcagaacttgaggaaatagaaatatcattacagcaatgtatgcattatgccgagataaaagacaaagaagactttataggcgagtttgttttatttaacctgcttataaaacatcttccgttttttgaaaaactggaccttgaaagcctgctataaattttatttatcaaactttacaatttattgaaattaagttatactgtatacattctttaactaactggatttattcagtatggaggtagaaatgtatcttggaattgacttaggcgggacaaatatcgcggccggtatagtaaacaaaaatggcgaaattttaaagaaattatcttgcccaactctgcccgggcgtccatttgacgaaataattggagatatggcagaattatgttcaaacttattgagcatctcaagcataactgaagacgaaataaaagcgattggaatcggcagtccgggagctatagacaataaaaacggagtagttttatacgccggaaacttgaattggactaacgctgctatatgtgatgaacttaataagtattataatattcccataaatttagaaaacgacgctaacgccgcagcctatggcgagtatgctatgtgcggcaaaaaagttaaagactttatctttataacacttggcacaggaattggcggaggaataattattgacggaaagatttatcgtggatttaacggagccggagccgaagtcggacactcgactttggtgtttaacggagaaaaatgcacatgcggaagaaaaggctgttgggaagcttacggttcagtaaccgccctaatacgccaaacttcccgctccataatgcttaatcaggattcgctgatggcaaagtcatataaagaaacaggagaaataaacggcaaaactgcttttgacgcggcaaaagccggagatattagcgcacaaactgtagtaaaacaatatatagaatatgtggctgacgggatatgcagtcttgtaaatatatttgagcctgaacttcttttaattggcggaggaataagcaaagaaggcggctatttattaaatccaataaaagaatactgtgagaaaaattacttctgcaaaaatattcggcaaacagagataggtatagcggtcctagggaacgacgcgggaataattggagccgctttatcagcccgtgattcactaaaatagattaagcataaatactcttaaatggattactgaaattttaaagaaatgacataaaatatattgaagtttattatattagattggattattatataaataacatatgtatatttttagtatatatgccaacctataaaatctatagagtatgaccaatttattctaattaaaaataacaagagcctgaaaatatcaggctcttgattgggaagaaatcattttatttattttctaattatttataatacactctacatattgtgataccgcattcatatttgcaagactatcccatacaaatgcttttatcgtttttacttttgacatatcaccaattggtattgttatacgtattgtttccttttctcctgaattcctattcaaatccttaatctcacttccaagcatatttccaaattcatcataatatgccgctataaactcccccgttttctttccggtactcacattttttgcggtacatatatacgtattttctttatcttcacctttctctattgatgtttcccaattccaccctccgtttaaggtctttatatcagcccaaggaatattatttgcctccgcatattttcttgcataagcatccggctcagaatatattacagccttatcacaatttgttattacattttcttctatctgagttacactatttggaaccactatcgcttccagtgattcacagtcagtaaatgcccccgactcaatttcagttgcactgtccggaatatatatttttttaattgccgaacatttgtaaaaaataccgttcaacactttaggtattccatcagataaaattatttccgttaagttatcgcaatttttaaacgctggtaaaataaacgtgcaagtgcttggcaaggttaccgtttttaaggaactgcaaccatcgaacaaacctgttgataaggatgtcactccctcttcaacaattatttctttaagattttcacaacagtaaaaagcccaatttcctccgctacaatttttgggatatttaagagttctaaatcccgcccctccaaacgcatacggagcaatacgaaaataatttgtaggaaaagacacactttttaaattagtacattccataaaagctccatctcctataagttcaattccgtccgggatttttacagatgtaatactttgattattacaaaatacgtattttccgattgatgttattcccatattaccgggtataactatatcaccgcctgaaccattatattctatcaaaactccattttctacaataaattcttctaaagcactaaaattaataccattttcatttgcatatttctctgcatatgaatttgcaattccatatatggttaaattgtcacagccgttaaaagcgtccatatcaatatttgtaaccgtttcagaaattactatttgatttaagccaccacaaccatgaaaagcttgtccccctatatatgtcgctccttttggtatctcaacattatctaaatccgtacattctttaaaaacgcctttttcaatagtctttaattctcttggcatttttatattatttaaattcacacaggaaaaaaacgaataatctcctatggttgttactccctctggcacagtatattcaacatcagtttttccgacaggatattgaatcaacttcgtttttgccttattaaacaacacgccatcttcagaactgaaatatctattcaattcatcaacttcaattttatttaaaccattacagtcaaaaaagacgtttttatctatatccgatacattagccggaattcttactccgcttatttctttaaaataactaaataaccaatctgctagctcagttaccggatatccctctatttcattaagtatatcaatctcaccagcagcagattcatcacatgacactatctttactttactgtctcttatctcataacttaaagctccgtattttccgtatataggaagataggtacatccctgagtcggtgttggctccggaaacatcgtattgcatacaaaactaggtgttggtgaagggctttctgcatcattatgcagaaccttgataacctgtctctctggaaaattaatatcaagaggtattacattatacgcatatgaaactaaagaaaatatagaaattataattgttacaaataacgataaagatataaactttttcataaatattgcctccttataaacgccgaaacacatttcctgtttgcatatttatattatactctttattctatatttcgcaaagatacagaataaccaaataaagtttatttttttagttatttcgacaggtgaattattatcacacttatataaaaaactgcaccttcaaaagcattcagctttttaggcgcagtttctctggtttatccaaaaatatgtcgcttattcaaatctgctcagaacaatacaatccaacaccggtttcatatcttcccacaaaaatactttcagcgtataagaatcatcatctgcagtatataataacgaacattcagaatcacactcatccaaatatttgcagttatttaacattccattcttatcataacttacaatgtaaagcgaattaaaattcttattatgctccagcaaaacctcaatttctctgtttgacacaaaattttcagttactaaatcaccattatccgtatatctcaatgttatatttgggactttgcccggagatggattaacatcaaagcttggttcaggactgcatgttattttattccataaagcatacagggtaacatcatcttcaacaatagtatttttgtcaaagtcagattcctttttatcaggagccgttccccatcctttaaactcatatccttctctttcaagaacaaatgtatctatattctctattgtccctccaatttctatatcctcacaacctattccactatcagcgccattagaatcaaaaaacactgttgctgtattttctactgcggctgtaacctcagaatgcacaggcttaccggtaaatggatatactggcgtatatacacaatatagatatttcccgacatcatacaatgttggagtatacgaggaataacttgcccccaatataggctcgcctcctgaattgctcataacatcatttctgtaccactgaactgttgctgtcgcatttttgggcatagatgattcagaagtcagttttatatggcgtttaggatttgatttatcacctttttcgattataacatttaacaattcaaccgatgtatttgatatcatatcagtcacaggagagacaacggtttttgatttgtcatcctctgtcttttttactgcaacatataaatatttgcccacgtcatcagccgttacagtatacttataaaatgtagcacccggtataggcgttcctccgctgttttcagcaaaatcatttctataccattgatatttaacccggctgtatttatcagttgttaaaacagcgtgatttactgcggcgccttcaatacttaatgataatggaaaatatccatctccgcttcctcctccgccatcaacaatagaaataggatacgatgttgcatttgaagttacgtttccaaaatacccgccttttcccgatgcagtaaaatacaaatgaaaaccatagtcttccgacgttggagtatacttatatgaattagcgccaacaattggcgctccgcctgtgttgttctcttcctttgttctgtaccattgatattctgcaacttcatcgccatatatagcagtatcaaccggtgttttggcaggatataaataatcatcaaaaacaacagagccatatctaaacaaacaacctattatctcttgtccgagctttggaatactgtttccattttcgactatatatgctccgcctatttccgctgttttttccacagcgctacatgtcggtccggtgataatttctccggtatatttaccattacccgttaccttacaatatagatagcttcctgcatcctcactcagcggaatataatatttttcttcagcgccagccaatggtacgccgccattatttgaattcacatcattttcataccactgatatgagaaactctcctcagtatcgttggccggaatatccaaaatgtcacttgtataaacttttacataaattctctccccaacaaccggataataattattaataaaagcatgttcaatattaatagctccggtttcttccgccgatatttttggcattgaacaaataagacaaagcagtaaaacaaaagtaagggacattactttgataaaatatttcataaaatcacttcctaacacaaaacgctatttaatcacattgttacgaaacagcattatactaacaaaaaacgatattatagcgcatatacgaccgcctccacacgctataaatacaattcagtcattaataaatgtttctgttttttcaaactataatcatttataaactaccatttagtaattattaatcaaactcatatcatcagtacaattttctattattgtatctaccacatctccgcatataccacccactttgttctttggagaataatatgctattgtgccttttgtattactgtcttttattattgtataatggttatttacccaaggaaacgcaccgccgaaaatacctccaacacaaactgtttcacctttcattgcgagtaaagacatattaacattacaattttgtatttctcccccgtaagtataccccgatacaccgcctatgtatgattcatctgtatttgatacgattgtccctgaaatattacaatttataatctgagccgggaaccacatataacctgcaactgctccactatattttgcattctgagctgaatttttaatttctatatttaaatttttgatactgcacgccgaaaagtatgaatcacctaatatcgaaatcaagccgctgtactctgaattctgatcaacagataatcccaaaatggaacgacctccgccatccaatacaccgagaaacgcctttggataccacgtttcattgcttaaatcaatatcattcatcaatttatacacttgatgattttctacaaacatatattttaattcatccggcgtcgttattctataagggtcttcatgtgttccgctgccttttggcaagttttctgcacttattttttctaactcattttgagcgtaaaccggctgaatagatgggctccaaagaaaagctctgactttctcaacgctttcatccggttttatctgcagcttcttagatacttttgcttcaactgaatcaagcgcaaccaaggcatcattcttatcatactgtgcaacatataaaatctcatcgttatattccctgaaatcatttacagatatttctaataccctgtttggttttatacaatccgcggcaacattattatcatagcgtatagatatatagttataccccgaagcggcacaaacatcttgtacagtacaaaataatattacaataattattatgtaaataaattttttacgcatatattttctcctattttagtaagttatattttttaaatattactgagaatgtattattattcaccaaatataaatattgattaccgccccgaaaatatttaaatactctataaatataataaaccatacaaacaaataaacctaaagctaatgttttaccataattaaaatttcctctccaatatcagaaacacatttcatataacaccatttatattatacccctcattctatatttcgtaaagattaataataaccaaataaagtttatttttttagtaatttcgacaggtgaattattttctcaactacatattattttacaaatataaagcaatagtctaatattttagactattgcttataaaaaattttaaatttattattttaattctcacttcttacttcttacttttatatatcttattatactattttcattatcctagctatacatatcattttttgttttgattgccataaatacattttttacagcatacacgataaccacatcacaaaatattcaattaatttactaaatttaattaatattttacaactacagaattatctatacaattttcaattctattaaaagcctcattatcaatcgcttcacctactataccgcctgcagatttatcagaatataactgtgtatttgatatacagttttctatataattaaaatttccataaaaataaccgcatattccacctgaagccactatatctccactttctaaattactgcactttgaaaaaatctgaccgcttgccgaacaattattaatggatgcataaaaatgtatggcagggttttcctggaactctcctacaatccccccggatactgctctatcaataccatatgaagcaatatttgcagtactagagcacatatttatatttgtatttgggctgatacctgcaattcctccggcacatgctttaacaccctgttgtttgcttcttgcagtaatattacctttaaccgaacaattttctatcaatggcatataaaatcccagttcaccagcaataccaccggaaaaaacagctgaactaccactatccaatatttccacatttaaatttttaatataactatccaaaggtacatcaattaatccctcattccgagtgcgattttcaaatttagaaaacaaaccgctgttatgagcattatcagctacctttatccctgtaatactattattaaggccatcaagttttccgcaaaagaaaaacggattccacctaacatcacttaaatcaatattgttagcaagtatataagcagctccaggctcttctctcaaataagacaattcggcaacggaggtaactttgtaaggactctcatcagttccgtttccaatgggtttctcataattaatagatttatataaagtatttcctacacatttcggcgaaatattatttttattatcccaaataaatacttttatcatatcagtattattaggcggaagatatttttctaaacagtcagaatttatattttctttaactatacagtttattaaacaatcatttatatcatagcttactataaataaactgcatacttcatctatgttagatactgagatttctaattcctttccttcgtcaaaatactctgtcaaatatattgatgaatctacatacttcactaatatcagtggtgtcccataagaaaaaacaactaagttaaaacttaaagaaaatataataattagtataacagtaagcacttttttcatgtcaatcctcctaataagtattttccatatcaaatgttacaggttttattacattccgcgccagtaattgcttataatcccaacgttcataacaacttattacaacatatgatccgtcctgacaatttataaattcaggaatatttatttgtgtatttttattacttaaatcaacattatctattctaatacgttttataaattttccatcctcagtataacgttcagctgtaacatacatttttttaggaacaaaatctgtacagtttataaaaatagtttctattgttttattagtatttatattaggtatgctaatatataaatcgttattcaataaggaaaaatctttttctactaaattgttataatacccggaaaccggtgaatagtcatttattaaattgcctctaagagtcaatattttcaatgattttaaatctcttagtgattcaatattttcaatattattatcgactaatcttaattccgataaattttttaatcctttcaaattacttatatcatttaatttacatctttccaatgtaatcttctgtaaacttactaatttatcaatgccatccaaatctataggtaaatcaaattgatcaacaggatttatgtataattctgaaatttttgtcaaatcctcctctgttatatttttgatatctttatttatttctttactaatagcttgtgcaactctaatatctttaaaatataaagcatttttttggttagaaatatttactgaaaatgaaatcgtatctccaacaagtgatatattacttatttctattccagcataagtaccatcacctaatcgcaaattaacagaagtatctctataaggataaaaacaggtcacaggatcatcatcgtctattaatatatgattattcttcaaattaactctatatataactaatccagttccaggtatataattatcgaaaattccctccttttttcgaaattccaaaatgaaagcttcatcagaagataacggagatctaatcatataacaattatttggatccaaaattgattcttttaaaaaataagatttactctcttttatctcaggtatattttcaatccattgtccacatctatatttagtatatgtgctgggcatttgacccatttgtgaatacattaaatcccactcatgaatattgctagctccgctatataaatcataagctccaaatatatgaaacccttcatgcgctaatacccctgcccgtacatatttggtatcatgaagttgttcttcaacctgaacattataattatatacttttttaccattaatttttaatgttttattaccagccatacaaaattggttcggatgaagtatccaattaccatatactatacttcctggcataacaaaagtaatataatctatacaaccatcattatcaacatcaagatctaaatctaacggcacttgtgattttattgagtttactgctctttcaaaaagcggaaaagccataccgttccagttagtaactgacccatcatcattaataaatctatattgtaatgaaccattattatcaacatatggtgttccctcatatgcgcttcttggtttataatctttataacttgcaatacatgtattgccatctatttggggatatatccacgagttaacaccagtttttccataagaagccgtggcaaaccagttttttaaagaatttccatccccattaaataaattttcataaaatgatgctggataggctttatcaaagtcgaaatcggaaaaactaataaatataactatattatttaatgtttcatttaaaaacggatgtagtttatattcatcattgcttaaagccagttcagcttctggctgtttataaaacggagatgcttcacgcatcatttttatatatgattccggaacatcagtaatctttattttatcacaaattgcaattccgcttggcaatacaacattatctgatggaaccataatattattttctaatttagcataaacatattgcccctgtatattctgcactattatatttccatcgctgtcatgcaagtatgagaaaaactcatcaccgctggtataacattcaattacatcgccgtttggctgagttattgtctgccttacatcaaaaaaaggggccgctttaactacttctaaactaataatatttaaaaccattatactaactagcgatactgtaaataatcttataatatatttatatattttaactttcattattattacccctctctaattattttttactcggcatacaacagacagctttccatttctcttcgcctttatttttacagtatttatatttcccgaccacttaactgtcgacactattgtggacttaaatgccatatagccatcgttaattttagtaatatatacattagcattgttaatatttcctgtaccaacttctttatctaatgtaaactcacaaacatctactatttcaaaatccagaggatcaaatttcaaactgaactctaaaccactaaaatcagaaacgtttaaaacatcatacggtatagaacaataatccccttcattaacatcaaaaactaatgtattgctaaacaatgtatcatgatctattttttcaggaacgctgctaataacacctaactgtccataagcatttgacccaaaagaccacaatctgcctttttcatccaatgcaatactaaatgcagaacctcctgttaccgaactaacattttttatcccttgtactaaaacaggcaatcttttggtttcttttatccctatacctaattgtccgtctcttccttctccccatgcgtaaagatttccgctatttgttataaccatactatgcgcatatgccgcttcaatatatttaatgtctgaaataccctgtattttaaccggaagcattctatccaccttatcaccaagaccaagctggcctatagtattactcccccacgaatagacatctccattagaatataatgctaaagcatgctctcttccggcagacaagtcttttacttcatacccttctatatcctgaacttttgataaaactgaagaatttactaaatctccttttcccaactgtccacgattatttgctccgcatgccatggtgcaatgatgagaatatggatcgtaagttacatcattattagaataaagatattgagttaatagatatgactctccgcattccactatggaatggaaacaatctataccagaaattttattaacattattaactttagaaccgcctatacctaattgacctgcatagttttgcccccaagtccaaagagaactatcatcttttattgcggcgctgaacccttgccctgcagaaacacaatcaacattatcaatttcagttaatttaacaggtgtaattatatgaccactataattataatctatctctttgcttgaattgttgccccatccccatacgtttccatctacatccacagcaagagtatgattctcacctttcgccacttgtttaatctttggcaagccctctacctttttagggtaatatacattatctttatttccatgacctaaatcgtcatacactccgtcaccccaggtatatacatctccatttacatcgagagcaacaacgctgttacgttttgcttccacctgtacaaaccgagtttcagtgggtatatcaagcgggacacagcttccgccgcttatatactttgatatatctgtgtttggcatatatccccacttaaataaattaccgtcattgcttacagcatacgtcgaataaatatccattgctacagtttcaaatgaattttcaacaactaatgttggttcaaaaactttgtcagatattgttcttattcccagctgcccataatcatttcttccccaagcataagtttttccgtcagaggtaaccgccacgttatgatggcatttgctaaatgaatttttaatatttgaaagtccaatattctgcttttggggcgtatatgtagttattcctgtaacgccgagctgtccgaatccattatctccccaggaataaatatttccgtcttcacctattgctaaacaatggtcatatcccgttgatattgattctatatcttttataacagtcttgttaggagataaaatatccccgctataagtaaatcccagcttgcaactgttattgtttccccatgaccatacacttccggtcatatcaaccgcataacttgaaaaaccagcagccgctatatcaattgaactcggtaagttttgtacaatagtaggaaccaatttatattctctgtcacctaatcccagctgtccattgccatttgttccccaagaataaacatcaccattattggcaagtgctaaacaatgataaccgctggttgaaactttaactatatttaaaccgctgagagtatttattttatttggaatatttgtatttaaagtattaccgtttcccagcattccccagctgtttctgccccaagaataaacttctccgtttttgtccatcgccaagctatatccatcgcccgctgttacttctataatatctgaaagcccctgaaccactaccggctctatactgcttgtgttagtaccatttcccaattgaccgtaagtgttactgccccatgcagaaacagtaccgtcggaattaatcataagaacgtggtcatttcctgtaacaattgttttgtgctctattgaatttatatcaatatttacatcaattattgactctaaatcgacatcagaatcattcattaacataacctgaccatttgtttcatatggttgaatttcttcttcgctaatatctgcaacagataaaacgtctccgtcattatttataatttgagcctcagtattttcaatcgtttcaataaatggcgcaccgtcttcatttatatacacttctggagtagcttctgcttctttcggttgttctgtttcaggtttaatctccgtttcaggaacttcggcttcatcaacttcatcgtttacttccggagaaggactggccgattgaacattttcttcctcagcattttcagcagcaatttcttcaggttccgcagaaatttccggctgctgcattgaatcgcctattccgggactgacttccggttcgtctgacaaacttatgtcagtttcaacaatgttttttggttcatcctgtcccgggtttgcagcgtatacgccaaaaaatattgttgttataaagacaatacaaattaatgaactaattaaccttgtttttttcataactttctcctttttataattctaaagtttcaccacacaccgcgccaattgtgcttaaaccataataatacaccgccaattatttattttattcgccattattcacatgatatacatatcatatattcgtaacatcatctatttaacattataacactcgttctaaatttcgtaaatattaaaactatacaaataaattttatttttttagttactatgtatattttacagtttatatttgtgataatttttcacaatatcaaatattaaataatttataatttttaaaaatttagaataattatcaatatatccgtaatcaaacttatttttataatataatatacagcaataaaacaaaaaaagacgataccggataaaatcagtatcgtcttaattaaattattaataatttttctaaaaggaatgaaaacaaaaattactctaaacttaaaatgatttaataattttcaggcttaacctggaaatatgcctgaggatgagcacaaaccggacatacagcaggtgcttttttgccaataacaatatgaccgcagttgatacactgccaaataacgtctccgtcttttgagaatacgcactcgccttttacattgtcaagaagctttttataacgttcctcatgctccttttcaattttagcaacgccctcaaataaagctgcaattttatcaaatccttcttcttttgcagttttagcaaatccggcatacatatctgtccactcataattctcgccgtctacgccgtcttgaagatttgttgctgtatcaggaatttcgccgccttttaaaatcttaaaccaaatcttagcatgttctttttcattattggcagtttcctcaaaaatctctgctatctgaacatatccgtcttttcttgctttgctggcataataagtatacttatttctagcctgtgattctcccgcgaatgcagcaagcaagtttgcttctgtttttgaaccttttaaatctttcataataaaaacaccctttctaaacaaatttgaaaacatacctggcatatattatctccacaccggatattattcccagttatttatattttaacacaaataaaataaatatcaacatttttacaaaaatattccaaatacattgattaaaatatgtttacaaaaattttatacaaaaaacacgcccaaacctacaactattattgccgcacttattaaaaagaagaaactatcaaacaaacatcttaagatttcctgacaggtctccctcttctctctaataacccttcttctttcgattctaagctctctttcactcatattagttccccctttcaagtatgtttatattatatcagctatacagtccaataaaacggactgcaaacccatgctaatattttatattcataaactcagctacaacaacatataatctaccatgtttaatactatggttaaggaaaggtgatacaaatgtcagaggtgaatttaaagacagagaggtttgatatttgcagaactgtcgcaatgaagtttggaagaacagtcgtagacgacacattaatagttcccgatataaaaccggatataaaaaagattttagatgtttcagcaagaagctacataacagatatcacacctgggcaggacaagattcatattgaaggaaccgcaaaggcaaccgttctttatttgccggacggcgacgttatcggcaatacaaaggctttgattatgagccgcgaattcagttatacaattgatgcaaaaggaacaactgcggatgaccaggttactgcggaatcagaaatcggatctgttgacagcactcttataaactccaggaaagtaaatatcagactgggcataaatataggagccaaaatatgcaggtgtgaaccccttgaactgccgacaggcacagatgaaatagttattgaatgtgaacccaagcctcccgcaatggatcttattccattcacgccgcggcaatccgataatgagagtgcgccgacaaatacctgttcaaaaattgaacttaagaaagttcctataagactggccgataaacaatttatttcagatggaagcatgatacttagagaacagcacgaaatttcttcaaagctcccgcaaatcggtgaaattcttaacgccacagctactgtcgaacctgaagaaatggttacaagcagcggcaatacacgtcttaaaggaatagtaaaagtcaatgttctatatgaagacgctgcggatacttcctcagacagcaacaaaaaatctttgctcagaaatgctgaatttaccattccatacaatgaacagtttgatactcctaactctatggatgacatggaatgtgacgcggaatatacagttagagaaatatacactgaaataagagacaatttagacggagaacctcggatgattggcgctgaggtagtagtcggagttagtatttccggatatatgatatcagagccgcaggcggttacagatgcatactctacggatggcagcactcttactctagagttcagcgaaacggctcccgaacagcttattgataccaaaactgctcaaatatctcacaaatttaccgctaaaagaaaagcaactgacgctgaaatacttggagtctgcggcgtaactattgaaaagacttctgtagatgatttaaaaattaaagacaatactgtatatattaaaggaaccattaatgccaaagtattgtgttcttcaaatgatgaaaatcaaccattgtacgccatagactgcaagactgaatttgagcatagttttgactgcgaccaagaacttggaaacaaagttgcatgtgacgccaaaatatttataaaccatttgggctatacaatatccggctctgattctgttgacctccgaatgataatcggcatatctatcaaacttgtaaaaaacgacagaattaaaaccgttacagcaattgacagggaagaatctgaggatactgaacagagaggtatgcagtgttatataatttattttgtccaaagcggcgacacactttggaatatagcaaaaaggtatcatacgacggtggatgaacttgtaaaaaacaataatatagctgacagagataaaattaatgtcggtcaaaaaattaagattatgtcactgacatagatatataaatttattataattttcatagtctaatttattaaagcaaaaccaccggtttcttaacgccttatacagtttccaaatatgactaatacaggtttaatctctgaaaatgatactgaaggcttgacaacgcaatactatttcaggcagccgcttgaaagcggctgcctttcaccgattttttgtttttctaattataaacgggtaagcttatttttttataatttaattatctaattcattacgttttattactctaattaatttttaaataaatttaatcataatctttttatttctctctaccatgtctgcatgctatcttcttcaataattacactttatattttcatgtatttcaattatcaataaccaagttttaattatttcccattgtttacttatttaaatacagcagaataataacttgcatataaatatgtttagagcaaatctctgcttatatattctctgttttatttgcctcacagcgttctcttaatatattatattttaactccacacaaactctttttatctatatttaggctataatataatgtaattttgacatctgtatttttgcctaattttaacttctttactatttatatcttattataataaaaatttcctcattattttaataattagaatattaagccactgttatatcaccaaaaatcatatttcctaaagcttttttcacaattctgattggtagtcgtttacatttttaaagcacaaaataaaactgtttatacatcatataaacagctttttctctaaaacaaaatattatatctaaaaataaatattgactattactataaattatagtaatatataatatattaaaggaggtaatacaaatgtcgctgattgatttaataattttaggtatcgtatcagaaaaaccccaaagcgcttatgatatccaaaaggatgttgaatatcaccatttagacaggtggacaaaaataagcactccatcaatatacaaaaaggttattactcttaaagaaaaaaattatttaacgactgatgttgtcaaaaacggtaagttcgctgaaaagtccatatattctattaccaataagggcattgagtattttcaagagctgatggaaaaatattctgatcaagaaataacaatccctataaactttaatgttgttatttcaaatttaaataaaatgtcaaaacctaaagctctggaacttatcaataaaattagagataatattataaaagctcaggaaaataacaaaaaatatacagaaatgtattcggatattccgctgacaggcaaaactatatttaagcagcaggcagcgctgtatagttcactattggactggatgagcgaatttgaaactgaatttctaaaagatttaaaaaatggagaataatataaaaagcatcttaacagtaacctttgaagactctttctggatagcagtatatgaacgaacatattttgacagctatgaggtttgtaaaatcacttttggttcagagcctaaggattacgaagtatatgattatatgatgaacaattggaacaatctgtgttttactaaacctataaaaagtgatgatacaaaaacacatcatattaaccccaaaagacttcagcgcgaaatcaataaaagaatccggttcagcggtattggaacaaaggctcagcaagccttaaaacttcagcatgaacttgttaaagatgaaagaaaaatcagaaaaaaggaaaccaaaaaacttgagcaggaaaaccgttacaatttaaggaagcaaaaaaagaaagaaaaacataaaggcagataagacgttttacaaatacaatataaaaggtcggcctcttgtaatattatcaaagcggccgaccccagtacaaacaatatcctactagattcatatcttttatgaagcacaatattagttacgtacaaacattttaataaaaaacataactatatatatctattcaacacggtttattaccataaggtcaccggattttaatttggtatatcctttagggataataactttaccgtttctatgaatcattgttatctgcatgtcgtctctttttggtatttctgaaatacgtctgccggcaagttcatcatcaggttctatctgacgttctgtgagcctaaccccttctatttcccccggcgctttcgcaattaaaaccagtgtatcttccggcagcagcacagtctccccgtcaggaatcattttgtcgcttccccgctgaagcaagacaagcaaagtctcaggcggaagaataatatctgcgaccttctttttcgcccaaaaatggttttcaggtattttaaatttaatatactgaaccggaacctcgtcactgtaatccgaaaatgtttttaacacatttatcttgttatcaatcattccaagtttctttgaaaccaatggtataagagacccctgaattaaaattgaaaacagcactatcaaaaaaacaatatgaaatatatcgttgctcgtagaagccggactcaccgtcgccatgacggcaaatacaatcgacgcggctcccctgagcccggaccacgatacaagcaaacgctgtttgagattgcttttaaacggagttaatattgcaaataccgccgcaggacgggcaataaacgtaaggaaaagcgcaatcgcaacagccggaagtattacgcttggcatctgtgacggaaaagataatagtcccaacaggaagaacaacagcatctgcataagacctgtcaccccgtcaaaaaagtttacaagcgactttttattttttatctcttgatttcccatgtaaataccaactatatatgtacacaaatatccgtttccgccgagcagggaaggcactgcatatgcaagaagagcgacagccagcgcaaaagccgcgtcaaaacctgcggatgaaaatttatattttttcattatccaaactgaaccaaacgctaaagcaaaaccaaacaccgtactataaacaaactgggcaaacaccaagtatgctattccgccgccgcttgccgaaccttccattaacgctaagacaattattgtgagcatataagaacaagggtcgttgcttccgctttctacttcaagcagagaagcagtattatatttaagattaagtcttttggaacgaagtattgaaaacacagaagcggcgtcagttgaactgataactgagccgattaaaaaactttcaagccattcaatttttagaaagtaatgacaaaacagacctgttatagcagcggtcagaacaacaccgagcgaagacaataaaacagcttttacagctacaggtctagcctcactccatttggttccgaaaccgccgtagaacattataaatatcaacgctgcagaacagatttgttcggcaaaatcataattgccgaattctatctttacaacaccgtcagaaccaaaaaatataccaagtaaaataaaagccagaagcataggtatacccagcttattcgtgactttattcaaaattatacaagcaataataaccaccgaagctattaaaatatataccggcatatcatacccccaatcaaaattgtattatctaataaatatgtttactatatccacaaaattaataatatatattatatcaaaaaacgctgtaaatgtaaagtatttttgcaaaggcactttatgttttttccgacgttttattaattaataaacaataattttacaaaataaatatataattataatcagattttatagtatatttctgcttattgtgtatatttattgtataacgaccaattttgattctcgttccgaagccttaccatatgactaaaaatcctacttttatttaacagtttattcagtttactttgttctccgctattcagtccgccactgcgcaattttatccgctcctgccaccattctcattcggcgagcaataattaaatctatcttattgcgtattaattttgaaaaaacattttgtattgttgtttaattctcacatccaaagatgcggccaatatacccggcagcattttctgacaaaaatatattacataaaaaacatatatataaaatataggcactcacaaaaacgcatttctttaaataataaaataaaacgcatatgccgaatataacttaaacatatgcgtttcgcgcaaatgatataaatgaatacacatattattcaacaacaaaagagtctaaaaaactgatttggttaaacaacaaaatcagtttcttatataaaatttaatattttattgcaaagttctttatatactgcaatataagtcgaagcataacaataactctatatcttaaatatacctcaaatactatccaaaaatcctttctgaaaaagtcccttactcaccttaatataatattttgtcagttctttttaaatcaaatatgttaaatgcggactttattatatacacttacaacactttataatataatatttatactagttagataatgacaaaataattatatatctaaataagcatacgataagtaaatctggatgctaaactcagcaagcagtataaatctgtttatatggattttttgtgtcaggaatcaatacataaaaatttttcttcattatttttgtcttatctccgccaaactcattaatatattcatccaggtattcttctatctcgtcaaggtcctgtttagacgctttttttgctattacctgctcaggcaaatcataaggcagatcatcacatcttaagaatatttttcctccgtgcatgcctgtcgcacaaaatctttctacaacaccgcctttgtcatgccctaagcctaaaacaattatatatcctccggcctgatattctcccaaaaagctgcccgcctttcctccgattactaaaaccggagttttatctttatatgctttcatatggattcctgcacgatatcctgcgtttccctgcacaaagatttttccgcccctcattgcgtaacctgttgcatcgccggatgaaccatgaataaatatttttccgtcattcatggtatcccctgtggcgtcctgcgcatttccaaataccttgacattacctccgtttagatatgctccaagtgcattgcccggcgttccgttcacaaccacatttttccctgataatccacagccaatataacgctgacccaaacaattatcaacttcaatttcaaagtctttggcagcccgtattttcttatttatttcatcataatatgtcaaacctgcatctattttcatcacataacacctcccatatacatctttctgacagaactggggaacgccatttcctgcggtttttcaatcatttcatcaaaatcgattgtatccagcggaaccttttcccgaataagccttgtataaattcctgctctttttatatcaccaatcagtataaatccttttagtaatttcttatcatccgaaactatcagttttttataattatcatcatcgcgtctgacgatttctcttccttcgtaactgccggcagtcgttacatgaatatcccaaaagccaatggaattcataggtatggcgtcatcataaagtttcatacctccagccatatttatacctgccgcttccccctgtatataggcgtttggcagcagcgccataacctgcagtttacctgttgcgctgttcaggctttcagaacaatcacctgccgcatatacgtccttcagtgatgtctcacatttgagattagtcactataccacggttgacattccccccggcttcagcaacaagctcagaattcggacgaaccccaaccgcgattaccactacgtcgtattctatccttgttccgctttttagagaagcgattccactgcggaattcatcaacactgtcgctgagataaaactttatcccatgcccctctatatattcctggactattttcgagccttcttcatccaatatacttggcaaaattctgtttgctaaatctactactgtaatactttttacactgtcacttattccctcggcacactttaaaccgatgaggccggctcccactatcaatactttactgtccttatccacagctttgcggagagctttagcgtcatccagcgtcataaaattaaatttcttttccactgtctcaagacctgccatttgcggaacaaatggacgagaacctgcagcaaccaacaactttccatattcataagtgtctccgttgctgagactaactgtcttagaatcagggtttatctttacagctcttgtccctagaatcaaatctgctccgttcttttcataaaaatcctttggtctgtatttaagcatattttcctcggaagtctttccccacaaaaaataagaaataagaggacgtccgtatgcacggtaattctcatcagtcacaacacatattttgccattcttgctttccctgcggattccctcaatacagccgacagcagcggcggagttaccaattataaaataatcatatttcaatttaaacgctcctttctgaacctaacctctgtcttcatacactagagccctattgggacatcctttgacgcaagccggttcaccaaactgattatcaatacaaagctggcatttctgaaccttgccttgattcggcacaggcataatagctccgaccggacaggccgagacacacgtaaaacaccctacgcatttttcagcgtcaagcataactgcaccatctttattcttagacaatgcgcccgaaatacagcttttgacacaaagcggctccagacaatggcggcaatttatcggaaaacttcggttattatcaccctcaacaactattcttggatgaatttcttttccttttaaagccttaaccatatcatctataccggaatttgcatatgcacattggtattcacaaaggtgacagcccagacaccattcttcgttaataaatattctcttcataatatctgttcctttctgtaaaattattcccccgcatgctttatgcctaaaatttccagttctttttcgttcatacctatacctctcagcatcagtcggtttcctcttaaagcctcaattgaattgatacccattccgcctaacatttcttttatttcatgagtccaggcatttactaaatttactaaccgttcttttccgtcttcgggattaagccttttgacaagttcaggtatctgagttgctattccccagttgcattttccgctctgacagcttctgcaaagatggcacccaagcgcaatcaacgccgaggttgcaatatatactgcgtcagctcctaaagcaaccgctttaactatatcagcgctgcttcttatgcttcctcccacaacaactgaaacatcacctcttataccttcgtcacgcaaccgctggtcaacgctggcaagcgccaattcaatcggtattcccacattgtcacgtattcttttcggagccgctccggtgcctccacgatatccgtctatcgcaataatatccgcaccgcttcttgcaataccgctcgcaatagctgcaacattatgaacagccgctatttttacaataaccggctttttataatcacttgcttctttaagcgagaatactaattgtcttaaatcctcaatagaatatatatcgtgatgaggagccggagaaatagcgtctgtcccttcaggaatcattcttgtcttagaaatatcaccgacgattttcgcccccggcagatgtccgcctatacccggcttagcgccctgacccatttttatttctatagcggcgccgctgtttaaataatcctcgtgaactccaaaacgtcccgaggctacttgtactattgtattggaaccatactgataaaaatcctcatgaagtccgccttcaccggtattatataaaataccaagctcttctgccgccatagccaaacttttatgagcattataacttatcgaaccatatgacatagcggaaaacattatcggaatctccaattccaattgaggtgatgttttcggcacaatatttccatttttatcgcggattatttcagcggctttttttcctaggtatgttttagtctccataggctctctgagagggtctatagacggattggtaacctgagatgcatttatcaatattttatcccaataaaccggatactcttttggagttcccatagctgacagcaaaaccgctcccgttccggcctgacgaataatatcgcttattgcctcatttgtccaattagcatttatcttaaacgtgttatcgctttttattactttaagagcatgtgtaggacaaagacagacgcatctttgacaatctacacaagacgccgtattgcttaccattttctttaaatcggcatcgtacttatgcacttcatttgcacactgccgctcacagacgcggcaggctatacacatatctgcattacggattacctcgtagtcaggatataaataatcacgtaccattattcttcacctccaatttctttcatagcttgtttatcaagccttacaataacaggctctcctccgcgcggagaccaaatattatcaagattaggttcaatcactctcatagcacattcctcgctggctatatacaccatatcgtccttttctcccacaaccatactgcgcagttttaacctgtcatttaaggccatcattccgcctgtaaagcccaataatattgagaaaggtcctgtaatcaaaagactgctgaaagtatttcttaaaaacttataccttgtcttttcaggctcgggcatatgttctatggttgaccaaaacggagccgcaatcactgacaccatctcttccagggtcaattctttttttcttaacaaatagtcggttatataagtaataacttccgtgtcagtcagcagactgcatttatatccatacatttcaataaatcttctattagcgtcatatgacgatatttctccattatgtactattgaataatcaagcattgcaaacggatgggcgccgccccaccagcccggggtattggtcggataacgtccgtgagcagtccagcagtatccctcatactcatctaatctgtaaaaacgacccacatcttccggaaaaccgacggctttaaaaactcccatattctttccgcatgaaaatacataacagccgtcaatctgagtatttattttatttacacagcggacaacatattccttaacatctaactgtgaagcggctaatttagttggaagtggatcaacaaagtaacgccaaatcaaaggttcatctgttatttcaggaattctgtttataggtatttttgaaagattaatcacatcaaaatgtctgtccaaatatctttcacaaatttcttttgcctcattgctgtcatagaaaacatggaaggcatattgatttttatactcgggatatataccatacccggcaaatcctcctccaagaccattggacctgtcgtgcataacagctatagagcttacaattgactcgccgcttattctccttccgctcttagagaatattcccgatatagcacacccagacggtattctgttgccgttctcgccttcttttaaaagcataaaatttcctcctttaatcaaactaaaaattaccgctaataattttgagcaaaataaaaagcgcccgtccgttgatacatctcaactgacgaacgcctttgttcggtttaacaagtatatcattatataaaaaaattgtcaactgacaaattatacaaatacatactgtcatcagataaaatgctttaaccttatataaaatacggcttcctgataattatttatattcctcctcccaaaactatcaccacactgccggcaataactgttcttattatctatgaatttatataaaactttagcttttattttgttaagagggttgaatttataaagcatttaaaacttcactatttctattgtaataaagaaagcaaaaataattccattttaaatatttataatattaaaatgtcaaaaaacctgctctataaacaatttacctaaaatataaaaccgcattgcttaaagcaatgcggttttgcatagttatcctatttcatattctttaaaagatttctcattgaaccatatgccatcattggcggatatgtaattataacaagatcgtcaaaatgaatatcctgataaagtgatgaaagactaaacgtattagtgtttccatcatttccattaaaacggcgaatatcaacgatatatacttcgctgtaatcatttactgtccatgttgaaaacgcattcccataagattctttaagaataaccaatttctttccattgacgtctgatgttttataaaccgtcataggattgtcgcctgcaataaaagctatataagaattgtaatctttaattaccggaacattttcgtatttaacctgctgtctctcctggtcattatatattgtgccgttcgcttcaaccaacggcataaatttttcaacataatcaggattagcttttaaaatctcctcaccgggagttccctccattttcgctgcaaatgagccgacgtagttttcactcacctgacgttcataactatcaagagacggcgcagtttcaccctttgcctctttaaatgcctgataagcataatatgaaccgcgttgagtccaatggtggtcagttgaaaaataaatcttttcagacgcatgttcccacagtggttttacagcatttactgcggtcacattgtcgttcagattttcatatacagtcttaaacgtactgagttggtccttataatatgactttggagcataaaattcatctgaggttggaatcaaaatattatatgtattaacacccggcaaactgtccgccacctcatttactacacttgcataagctttcgcgctgtcctgtgtaagttcctcagggtgcatagccattgttccgaacacaagtattccgttatatgtttggacgccttcttctgatactctatagtcatcaccaatatatgtatccttcataaccagagaattagcgctaggagcattgcctggtgcagaaccgcttgttatttgaacagtctgtgtatcttctatccagctgacattacagcccaaactctcggatatagccctaaccggtaccaatgtacgcccgtctatctcaagcggcggaacatccatttctatctgctgaccgtctttagttagcattttgttgccaatctgcatcactattgtggttgaccccttataagctgttattgtttgggtcgaatcctcccaataaacctccgctcccaattcctcaaaaatcactctcataggaaccattgtacgccactcgattgtctgcggcggaacatcaaactgaagctgttttccgtccaaaataacctttatactttcgtcagctgaaacagtgacagctgaaagcgaggttatcagcatagccgcaaataaaacagcgctaataattctctttatatgtctcattatactacctccttatttattatattaactactaaaacatatataaatctattatacattatttaaataaaattcgcaatgaaaattaacctcatattttttctggcaatataaaaaccgccgtatataaacaaatatttgttgatatacggcggttttacctttacttattatcccgtttaaaacattagaacgctataaatttgattaaaacattcttctctaaacgtattacattacttgttatattatgacttcatatttctttcatataaaaacatacatattgaaactaaaattatgattaagtatcctattatactgaataaatcgggaagctctgaaaagaaaataaatcccaatactgccacaaatattatctgagtataatcaaatactgagatttctttagccggagcatatgagtatgccgcggttattgcaaactgtccgccggttgccgcaagccccgcccccagcaaacttaaaagctgccaccatgccataggctgaaaatccgcaagcattaacggcaaggtcgttaagcatgaaaacgctgaaaagaaaaatacaataaacgcgcctctttcacctcgtttactcaaaagcctgaccattgtataagcgataccggcgccgacgccaccgattactcctgccaaacttgcagaattaaaactcacgcctgtcggctttattataaacaacgctccgacaaacgcgataacaacggctaaactttgccatatattcatcttttcacgtaaaattataaatgaaaatattatggcaaaaaacggagaaagcttgttcagcattgaggcgtccgcaagaacaagatggtcgatagcataaaaatttcctaatatgccgactgtcccaaaaaaagctctcaaaagaagatacggcagattctttttatcaaacctgaatttttcttctgttctcagcagcattacagccgcaaatataagcgctacaaaattcctgaaaaaacttttctcaactgacggcaaatctcctgccattctaacaaatgtgttcataaatgcgaaacaaaacgccgatattattatgcacgttattccttttgttttactggcagttttcaaattaactctccctcttctttataatctaatttaccatattgatagcctgctgctttcatttctatacataccgtcaccggactgcaaatgatatagatttataaacttttcaaagttagataacaccatattcacacgcactttatttggtgcatgttcatcagtcaccaacagcattttagcatattcttcagtgcagacagacctataggttctagcgtaggttttaaaaagctcatccaggttcggattgtctttgccggcaatatcaagcacgcaggccattccgccgatatccgcaatattttcactcagtgtaagcttcccgtcaacaaaacaaccatccatcacttcaagcttatcatactctgatacaaattgtttacatatctgattaaacgcagaaaaatcttcggccttccaccaatcatttaaatttccatctttgtcaaattgagaaccaacattatcgaacgcgtgagtaatctcatgtgctataacactccctattcctcccaggtttccttcataacttgcgtttggactataatacggagcctgcagtataccggctggaattactatgcagttattggctctgtcataataagcgttaacagtctgcggagttaatgtccagctttccttgttaaccggaactttctcatttatcaaagcaacatcctgattatgcgccatcttattatagtcaataagatattccataatggttccgccatcctcaatgctgcgaattgaataatcacggttcgtataatttataagataatcaggatagcctattcttattgatatagcgctcagcttttcaatagcgacatttttcgtttcatcactcatccaatccaattctttaatcctgttttcaaaagtatcaattatcactgacgccaggtcttctatttcctttttggaatcggaggaaaagtaacgttcaacgtattcttcaccaagctccaatcccataagagactgggttattgttacagcataagcgtcaggtgtaatttgggcgttaactccgctgatactattaatataattctgatatgcattaaacatctcagtattcaaatacagagacgagtagtctaagaccgacgcccgcaagtattctttaagcataggaatgttatctctgtccagcaaagagttaatggttttagccaattctttatcatatactataatctcactgacattattataccctaactttttaagatatcccagcatattcatatttgaaaataaattttctaaactatttgcagaatagacattataaatatcaccgggattatcccactgagactcgtccatagtagcattggcgagtttaagacaaaaccttactgccaagtcagccttcttttcagcttcggccggcgactgaccgctgattataaataatgttctgatatagttcttgtaattttcttcaattttttcatattccccgcttttaacgacacccgattcaatacctgtatagcaagattcaaacgtaagcgaatattttgtggaatccttaaaatcattattaaccctaatcggaatcaatgaatgaaatccattgttttcgagctcagccataacattggtaaaatcagaaatattctgaatgccgtctatcatatcaaggtattttcttataggctctataccgacgctgtcacgatatttaacatttgccgaagccttatatatatcaagtattttttgtttattgctgtccttcggcggtatatttcctatataatattctgttataatatcaccgattatattttgtatccgataagcattattttgagaaagctgctcaacgtttgaccatttagcataaccttcaggaagctgtgtctcagaaagccactgttcatttacatattcataataatcatttttgtaaagattatttgtaggaagagcattctgatatttaagaagacgggaatacacaagcagtacctgctcatatgtcataaaatcgtccgaccccaaagttccgtcgccataacctaaaataagcccagcatttttaaggcggcaaatatcaggaaccgcccaatccggaatatcattaaaaaatgattcaccatcccctaaatccgtaggcaaatcatcctgagataagacgcggctcactatcgcaaacgcctcaactcttgttatgtagtcattaccatggagcttgccgtcatcagagccattgactgcccccaaagaaactgcaagaccaagacttttctgatatataggctcaatttcagaactgtcagaaaaaactgataaatcagccggtttaacagccttaagctcgtctcccaaaccgcttactaaaacatataccgcctgggctctagtcacatatgctccaagctctatgtttaaggatgcaagttcattttcttcagaaagtttctccggttcaggacttggctgctgaccgactgtagataaaacttttacattatcaagcgcagcattgccgcccggtctgtttaaaactccgtcactatactttactgataatgtgtcaaatctaaatagaccctgatagatatcagaatccgcaaacacagaaaaaggagttaagatacatatcgataaaattatagcctctagcagtataattatctttttcatgtatcccaactcctataaaatcaatattaaattattaaaataatagaaaaatctttctatataattatttaccccttttgtttacagtacggtttatggcgctgattaaggcaataattgaagcgtttataatgtcatcatggattccaacaccccatgtaatattaccatagctgtctgataatccaatataagcacacgccttcgaatttgaaccggtacctatagcatgttcctcataagtatctatggtgtatttacccataaggatgctgtcaaacgcattattaacggcgtcaagacggccgtttccgcttccggtcagcacttcattctctccatcacgcgacactgttatatgtgcaacaataccattatccttctgctcaaaatgagtttctatcatcttcatagacttatctatattaatatatgtatctttgaatatattaaaaatctcatcaggctggagctctttatgtaaatggtcagaaacaccctttacaatgtatccgaaatcttcacgcatcttctttggtatattaaaaccaaacctctgctccatcagatatccgataccgcccttacccgactgactgtttatacgaatcacatcgccgtcatattcacgtcccaggtctttagggtcaacaggaagatacggaacagtccagcagttttcgcatttttcttctctatatttcatacctttggctattgcgtcctgatgtgagcccgaaaaagcagcaaaaaccaattttccgccatacggttgtctcgggtcaacattcattcctgttaatctttcatatgtctcgacaacttcaggcatatttgaaaaatcaagcttcgggtcaacgccatgggtatacatgttcaatgctaatgttactatatcaacattacctgttctctcgccattgccgaaaattgttccttcaacacggtcagctccggcaagcagtccaagctctgtatcagcaacacctgttcctctgtcattatgaggatgcagagataaaatcacattttcacggcaattcatattatcgctcatatattctatctggctcgcataaacatgcggcagagacatttgcacggtaaccggaagattaataataacctttttttccggtgttggctgccaaacgtctatgacagcattgcagacatccaaagcatactcaggctcagttccggtaaagctctccgggctgtattcaaacctaaaattaccttcagtctcgtcagcaagccttttaagcaattttgcgccgtcaacagcaatctgtttaatttcttcttttgattttctaaacacctgttcgcgctgagccaaagaagtcgaattataaacatgaacaattgcttgtttagctccgtccaaagattcaaaagtcttttttattatatgttctctcgcctgagtcaaaacctgaatagtaacgtcatcaggaatgagattatcctcaatcaatctgcgaagaaagaggtattctgtctcagaagcggcaggaaatccaacttcaatctccttaaaacccagcttacataggaaaacaaaaaactccaatttttcttctaggctcatcggcaccaccaaagcctggtttccatctcttaggtctacgctgcaccatattggcgctttttcaatagcgtctttttctacccattttaatgatttaacgggcggcataaaatagcccttcttatacttgttaaagtttttcataataacctcctcctttcaaagatatttacaattactgaaaattatattgaaaactctaacttaccaaaaggttatgattttagtaaggaatttattatagcacaataacaaaccttttgcaatataattttatacaatatttttcatttatacacttttgtacaaaatgttctatgaccaagtattgcgctatatttatttttaaatataaaaattaattaaacaaaattatatttctagttttataaaataaaatacataacaccttaatattttttataccttagattggtctgaatagctttatcatctcaaaatttttgacttaataacaagaatatgatatactgcatgtagtattatatttgatttatggtatgagatagatttagctagaataaggtcagctgatattatcgctatatttaaaatttcaaaagcatgtaaaacaaaatacaaactagataaaatccccggacacctactactaacagggttctttgcacatcagctaaatatccgcaaattacggctttatcttcaaacttagcataaaacggacattttcttgatgttattttgctttaaagcaaaataattcagctatgagttttatcaatattctatagttgtaatcactatgataaactgaattagacatgaaacaataattgcagtttctttttaaacgctgcatataaaagctacacaaatataaatcaacttcctaaatatatatttgaagaaacgatttatttcttttcattatataactttggaaagaaaaagaagcatgaaaaatgaactatgcgattatgacattacatcagaagtaatgtccaaattaattaaaaaaatataaaaacacatttaacgcagcaaagtgatatcaagcatttcaaataaattatatgtttacataagtttttcacaacatgttttttagaattacaactttacatatcatgtaaacaaacagagattaaaaagaaatggagtaatagattttgagaataattggaattgaccccggatatgctatagtcggctacggagttatagattatataggcaacaaatttaagatagtcgaatatggcgcgattacaactgaatcgaatcaaaatatgaatgagagatttaaatctatacatgatgacctcaacacgataatagaacgcacaaaacccgaatttttagctattgaggaactgttttttaacagcaaccaaaagacagccataaacgtcgcccaagcacggggagttcttttgttatcagctcttaatcatggcataagcgtacacgaatatacaccgcttcaagtaaaacaagcagtggttggatatggcagagccgaaaaaaagcaagtgcaattattggtaaaatcaattcttggactggaaaaagtgccgaaaccggatgatacagcagacgctttagctattgcagtatgtcacgcccattcatataatcccagagttcaaaatatactaaatcaatcataatagccgggaacaaaaaataaaatatttcaaattcatagtttgattattttctaagataaaacaatgccgtttattacatagacttatcaataaattaacatataaaaacatatatatttaattctataattatttcataatttattttttattaaaaatatagttaactcaattcatatatttacatggtaaattctttatatgctaaaatactttttcattaatcttacattgacaaatcaaacatagataataaactaaatctttattacaactcaaacagaagcaacataatacaacagtaataaaaacattgtataatccgtatttatctgtatagaaaatacgttggttagccaaatgttagttaaaactcatattaatataactttgtaaataataaacaacccccgaaaacttatagttttcgggggttaataaattataatcaataaaattatttaatgatttcagtaacaacgcctgaaccaacggttcttttttatatatactttcaatccacattttaacaataatcatagtcattaactgacgttttaacgtgcttataggcatatcatattatatcacagcaagccacctttaatcagtcaaatatcagtctaatcagtcaaatatcagtcaaataattttctaaaaaaacgtgtaaattataatttacttttcatcccttttaactctatccttaggcacataacctaacttttgaatatcagaaataaacttatttatatctacctcgccatttattataaagttaatcaggctaatagaagatggaaacctcttcccactttcaatatctgcatattgtcttaatgacatacagcatttttcagccatctttccctgactaatattaaattccattcttttaaaatacagtatattactaaaacacattttcaaaatgtcaacaggttccataattccacaccctctgataaaatatacaaacattttatcaatttatcgcataaacacatatgtgattagtctcacatttttgttttataataaacattttgatttagaattatgttataataacttattttatattactatagtaatatttacatcagttaaaaatatacaaaatacacccttattttttgtgcagtattttcaaaataaaacattgacgttgcacgcattgcgtgttataatatagacataccaaaagaaaggaggtaaaaaattgtgggatataattgaaaaggtagccaaaatcttagcttcaatcctcgctggaatttatagcatgctaaagattattgactacctcgaaaagaaaaagtaatactttttcaaaaggatttgggagctaaggctccctcatccttactaaattttatcacacaaaaacaacatggtcaagttttttaaaaataatttacaaagtatttttactgttattttaatgatattatttatttctgatactaattttaaaaatattaaaattatagactatattattataattatctcagcaataacactaacattaactattatagagatgattataaaaaacaagaaataataattcattaaaagacaaaaaaggagtgattataataaatataaaggagactcgaaaaaaagtagggctatcacaagtagaagctgaaaaatatattggcgttcctcatcgcacatggcaagattgggagcttgggaaaagaactcctcctgactatgtcgaacgtttaataattgaaaaattgctaagatacaaagaaagcaaagataaaaagtagacaaaaaatcaagctttaaaatgtgaaaaatagagcggagctattaaaagcctcgccctatttttcacttaattactctccgtaaacaccagctctatcattgactataaacattcgtattaggtcttctgtaagacctaacttgccttcctcatcaccttttaaaaatcccttgtcaactaacttagtaattgttggtcttgcccattcaggcatattttcgtccacgtaatcataaatcattggattttccactttttctaatctttcattcagttcttcatattctctgctcactagtttgtcctcgctttctaatttatattctattcccaaatagtcgcaaattcctttataaattcccactgcacatttatattttccgtcatcgctggctaaaaacctgttgtcatcatagttatctataaatgcagtctctaccaatatagccggcatatttgtgtgttttataaccgcaaaattagcagatttgacacccctgttatatctttctgtttccgctgtcatatgcggctgtacacattctgctaacgcccttccctgtgtgctgcctgtgcaataatatgtctcacagccatacgcttttgtgtttgctgcattacagtgtattgaaacaaatatatcagcgttccagctgttggcaccattatatctgtatgcaagactaccgtttaaactgcttgataccgtatcggtaatactatcacggctcattttcacagtttgtccgctgttaatcagcatatctctaagtaatactccaatttgcacagacacatcttgttctttcaatccatatcctacggctcccgtatctgctccgctggcattatgaccggggtctatgtatatctttgccatttatattcctccaatctattatattataacaaaaaaagaatgccacttagtgacatcccgtaatgctattttaacttgattttttatgtatattcttgtataatactgtcgagcaggtaagaggaaattgaaggacggttgtcatctccatatgctgtttctcacagctgaaaggaggtgtagcttatgtggaaatacttattaaaagtaattgtttcaatcataataatttttgtgattgtctccataaaagcagtataaccgccctcttgcacaggacggttatataaattttaacccgactatgacaaccgtttaacggttatctcttatctgctattattatatacttatgtattcaatttgtcaaccgctaattttcgttttctttaagctctgtcattacctcatccgcctttatagcctcctgagtaaaactgttattcttccaccagccccatactgccgcaccaattgtaaataataggcttataacctgatatatatcatcgtccgctatatttagcacctgcttaccgcacatagccaatacctgatttgctagtgctaatattaatactatggttcttgctattgttcctgccgttatgttattcttcatgcttttttgcctccttattttaataaatttgtgattgcgaatcctacaaatccgcttacagtcgccgttattagtgctgttataataaccgtgagaatctgtgaaggtcgtccggctataacgtctattttttctttaacatcagaaatatcttctttgagatatttagtttcaacagctaaagatttcaccgattgggtcagctcttcaatgttgtctatcctatgatgagcagacttgacggaggattcaaccgccgtcagccgctctctgattgctgcctcattttcgtccatgctctgccctcctaattagttttataatactcaatagttatagtttttccggcagtaattcccttggtgtacaaaaataggtattccgtgcttgaagataacgtaaaatcaccctcaaacgtatatattgcacttgaagcgttaaacgtgcctgttggcgctataaacataaccgtaccatttttatcatcaatattattagtagctgtcttaagctggaatgtacaagcatattcagctttttccactgttgctctgaaatgatacgcacctgctgataagggaatactataccacgttcgttcgatagcttctgattcagaggtgtgctctatcaatgtgctgtaattgcttcctatatgcaatgttacaacttcagatgttagtatttcccccatactacttgtcacgatacatctgtatttgcgtaaattatgatacggctctactgtaaactgcaatgtgcttgatgtgccgtctgcacaattagtccatgtaccaacagggttatcacctctcacgtcaagccactgccatttataagtcaagtctgtgccttttgcaattatcgacatatttgcagtttcaccgaccgctgctgtaacgtcttgcggctgttgagtaatctccgctgcttctgccgccgctatcgctgttaccgttaatgtacaattaagtcctttatattttatatgatacgtattttcgccctctgctaacgtcaaattcgtttcttctatggtataatcggttacagggctttcttttccgcttgtcatggtcaaaattactgttataaacgacttgtccaatgtgtcacctgctatgttttgagtttttccgtaacttgctgatatgctcgcttctgtgtcctcaaataatcctaatgcggttgctctttgcacgatatatcttatagtatcatcatcaagcttgcattttgtatcaccgttgggcataacccgaaacatattttccccctcgcctgtataatacaccggagccttgagccttgcggctttagaaaacgtttctatacgcatttttttgctgatagcataatcaataatatctcccaatgtgtcagcactgggttgatttgcatttgcgtgagtgcataatataagccattgcttgttggcaatggctgtgtcaatttgagatttagcacttgttaaactagttgaaccgctttgcaatgtgaatcttgatattgccataggctcgcttatttcatcatttagacctgtatcaccgctaatcaacgtcattccatatttagcgtatcgcttcgcaaccctttttttaattgcctgagctgtgccccatggatacaccatgcagttataatcaagtccattttgtctaaataatttatcggcgtccccaaattgatgttcaagttgttcttcgtttaaattttcacctgttcgaaacactttaacatcatgactgtatgtatgattctgtaaatcaaatccatcgtgaacaagttcttttatttgtctccaattcatagcaacataagggtcgccgcttgtcgttgtgcctattggtgtttctgctctgaaagcaacaaccgcaaaactgcacctaacacccttatctttatatatcggtacaaaattatttaaaaactcaatagacccgtcatcatcaactatggtgagaaccgctccgtcatatacctcattgccaatattgttactatcattcaggtgatgaatgtatgtattattaatttgtgtttggagttccgtattagcagtagtaatcttcacgctgctccacgtagtctctgatgaggtttcggaatcatttatagctgttatatctttgccatctgctccgtctttgccatctgctccgtctttgccatctgctccgtctttgccgtctgctccgtttattccgtctttgcccggctgaccttttaggctctctaaccattcaatttcagttccactgaatccattctccacagctatttcataagctgattttccgttttttcctgttcctccactgctattatctaatctgtctaatatttgctcatatacgttttgtgttggttcaggcggtgtttctccctcacaatatccgctctttataacagatactttgcacgtgttagttgttattcgcactccgttattggttccatatattgacatacagaaacttggtgaccttataacctcatgtggaactgttactgtattatcatcatttaataataaagcatatttttcattaaaacaattattacaatagaatataacagttttcgttaggttcaaccaatcatcagaaaaatcaaaacggacagtcaaatatttaacactgtccgccactattaaatttctgcttcttctacttagtatttgcgaatcaaccttataatcaattatcatatacttacctcacaaatattttaatatggttattatctatccgctcaagcacgtaaaaaccgtcttctgctgccgttgcttttgcctcattattcggtttgcagcgtccttttgcttcacatgtgccgtcatctataacaaccaattccccgtgtgttcccatatatccccattccgggcggtcttttctcggtatgtaactttgtgaagggtcataatcttccgataaaatatacacatctccctcgcctgcagtagttataatattgccttcgttatccttttcttctttccatgttatgtgttcagttaataaccggccaaatacatccttcttatatttaccgctccactggtcatcataattatttccaactatacatggatttcctgatataactccgagtaagtcttttgggtcttctgaatttgcaagccgtatcttctcgccgtcaaagcatacaaacagtccgcacctgtcctcattatttggatttccgtcagaccattctctaagttccgcataatcggctccggttccgtttattgacttcatagcatacacatcaccgctgtacgccgcacgaaaagcgttagaacgtgaactcaaagtcccgtttccaactacaaatccatcgccgttattatgagaataatatccggctgttggttctaaattatttttaccgcacacagtgttatatccgttgcagagcaaagaccagccgcctattgctaccgctctctcaccatttacaacatttgaataaccgcctaatgacacagaacaaactccggggaccgttccttgtccccctatgacggcagaataatttccctctgcactagattcatccattacatttatcatttttttattatcaatagaattttgcagtgttgtgtccgctgtctgtcttgaattaatttcggatgtaagtttactctgcactgtttcaactgattgggatatattagattgcaagtcactctgtaaagatattaagtcactaaacattgcaagtttttgccattcgtcggtctctacacttccactcgttgatttttttatcatacgtatatatggtgtatagggtgggttaggtttggtgtaatctgctttgtacattatttgaacagccgcttcattatagttctgatgctgtattttaaaaaccattaacacatcaaatgatgaagcatatgtagcagtagtatgttttccataataaaatcctgttgttaattgccggtcaaaatccgcacaatatttaaacatttttttcgatatatctgtaattgcagtatctataatatcacaattggcattatttacgctgacatcataaaattcttccggttcaggttttgttaaatttaagttgcttgtatatttgggcataaaatacctcctaatttaataattcgcttcgtaattgttcctgcgtatagctgcctaaatattcatgagtaaatccgcttaaatctttatacgtattatattttaagtcaaatactaaaaacatattgcaaggcaacattcgtttaacaagtttgcgggcttcgacaaatttacttttgctgcttaacccaattcttatttctataaaatattcatttggtttgaaattgaccgatacattattagtgccacataagttttcgagtgtttgaattaaataatgatttatcatgcacatcattgattttatcctgaaccgcctgtcatctaatgtatcatttgagccaacatctaaatttagtatcttttcatatctttcacaggtctctttgtctatttcgtcataaaatctatttgctatcgcctgtcttcgcaacagttctattctgtcaaactctgtgttttcactctcaaatatagctttaaattcccttatgtccgtcaaaaattccggtacatgacgagataaatcaaatggcatttgcatttaccacacctccaagaactatgacagaatcgctgtcgatttcataatttttttcaagcccatttattttagtgtttgaaacgtccagtatacctgtaatatctaaaagtcttttctccaattgtgatatgcgcactactattgttgatgtatcctcaccgttagaccattcagcgttgagttcttttaaatatatattaatacatgctgttacatcttctttaacgtcagaccaatcatatcctttaacaaatgtacagcataattcaatatttatttcatcacgaactgctgcttctacggttacaacatgccctatcggggccataccatagcccaaaccttcataatctattgggtccagctgctcttttacataagccactaatgtatcattaggtatttcgtgctgcgcatttacaaacacaacttttactgtcccgccgccgttccatgccgggtaaatctttccgcctccaacatcggataattgtgataaatactccatataatcagcaatattgcccccgaacctcggatacttaacactatttatatatctcgctctaaaatcgtctgtcgtctcatcatcttcgccgtgtatgagtatttcaattatttgggcactttttaatcctgatatttcttcaattggtattaatgtccctaaatatgaattgcctgcagttccgggtgtctcgcacattactttataataataacgctcacctgattcacccatagattcaattactttataatttaatgcgccacctgaaaaccttgatagcatatttacttccttgtcaaactcggcctttaagattgcatttgtagcattatgagcgtaaatacctcgctctgcggccatttttgacagatacaaccggcttgctgtgtctggaaatgtctcattaattatgtcttttattacgtcatacatctgagcaagttctgcggccgcaggtgctaaagcacaataaattacagaaccttcacgtttatctatgttggctggcacagaatcaagcatacggttcattatactatcaaaagactgtgtttcatccatcaaaccaccaccttatcgtttatactaatatcgttcccataaaccgtcccaactgtgaacttgactgtatatttgttttgttcgcatgaaaaactaaaccctgatacagatgttattctatcatcttgcattagtgcgtccagtatgcgttttccaagttgtgggataacatactgcttttgctttccatataagtcttcgagttctattccataatcccgcgaataaattatatacttgtatctctctgttcgtaatataaaataaatagcttgttcaaccgcttcaacttcatcagccattccaataatcctgttttgctcaaaatcaattttgtatgttttagaaggtgttgatttaaattcgaacgatttaaatatctcagggcttattgcagttttcggtgtcaatcaatcacccccacgactaaataccgttgtccgccattgttgcgaatcatggctaccttatctccatttttcagtgtgttgtcaataataacttttttaggatacgcttcttctgtttgcgtttcatacggcaccttcaagtgattaggtataatcaaagcgccctccggtagcgttaatctttggtctatatacactttgtatgggtttatgcttataaccgttccttttataatattagcaagtttttgagcttccaatatgttgcacactatagttctgattgcttctatataagtcaatcttgaaatacaccgcctttcagggataaatccattatgtgcttaccgtttgacaccttgtgctttactgtctcacacagcataaaattttgctgcataacatcacctaaatctaagataacacataccatacatccggctctgatatgtgggtttccaaacacgttctgaatattaagcgttcttatttttttgcagtgcagttgtgatagaatttcagccttttttactccatcttctccatcttcaattttttcacaatgctgcagcaccccccactcgtttatcttttcttcattgttgtttatgtatatttcacgttcacctgtgttcccgttgtcgtaatacaatttaattcgagtgctggtatcattaattgatgttttataatcaatatcacacgcagtttccttgtctacaacaaagtcagtaatccagtctttgatattgcggaccttcagctctccaaaatcatcatatataacatataattctcctgtatttaacaacgtctcatcgatagcattttccaatatatcaaaaatagttacgttgtcttcaactctaagaggtattttatagccggtatcaggtaaattaccgcaggttaaattatagtcattggctatcattttaagaagttccgcaagatttaagttttcatatacatagcagtccttattcttaaaatatcttagttggtcataagctactactttaatagtcgaacctttgtttctgcttttttcaaaaacatagccgtaaaacatatttatatcgtttttcttaaagacaacctgtgctccttccttaaaatcaagttcaggcgtttttactacagtaaattctaattttgttggtacgtcttttctttcgtaagttagaactgtttcaccgctgcataccgggtaaaatactgtattatcatgatttactatgtataattcaacacctccgcccaatgtatttttatcctgcatggggttagtcctaaccgctccggttccgccaacaacactttttataacgctcgttgttattggcattgaagaagaaccgttaaccatagtatttgaaccggaattattatacctgccatcaaggctgttaggtctccaatacctgaaaacatgctcaacatattgtccgtctccataccctttttttgaggctctgccggatgtaaaccaattatctccatatgtcgctaccaatgcgtccacagtataatgtgaataattatactgctgcactgtttttaaaatatcgcctccataatgtacaaagccttgattcaaaacataggcggcatattctatatttttagcgccatccaaacggtcatcacttgtccatgcactgccgtatttacgtccataagcgccgaatgacaaccaaccattaggccacccctcgttggcatctaacagagtgttttcaatttgcatgacgccccaagccggaccactggatatatcggttaacccgctttcctgcatacctaatgccgctaaaaggttagggtcaatattatactccttaccccatcgctcaaaaagacttgcatatttactgtatccgctgctattgaaaacttgttctgcactttgtccgtatcgcactccctggattgtacctgttgccggcggtaatggtgtgttgcttacattttttcctatagaaccttgtccactttttgaaactgcataaaagcccaactgcattgcattcttaatcttatcataagaatgcttgtcttgcgttcttgcctctgaagcagggtcattaacaagataatatccgtcagaagtcagtccgactatagtaagcacatgtccgctgccactgctagaaaatgaaccgttgccattagccgaaaatatacacggcataccgctttttatagcatttgtcatactcgacatattgcagcctaattcatctacagttaatccatatttttgacctattgagctatataaaccaccacttgtaccgttaccatggaagccatgtgactgagagtaatccgcaacaacttgagggtcaacatcacatccatatgacttcattatcatagccatggaagttggaccacatccagcaacggctatactactgggaccatacatcccccatctatcttctttttgattataataagggaaagaattataatatttcattggttcttgactcatttttatcacctctttctgcatataaaaagaacgccctttcggacgttcttattttcaatccacgcaccctatcgggtgtgacttaccgccattgtaaattctgttatatcaatcctatatttcaatccacacaccccacatggaggtgcgacacaggacatagctctaggtgtacttgaatcaatatgatttaaatccacacaccccttacagggtgcgacatcaaaaatatataatagttatatacttttattcttataattgttatattgtgacataatatttatatgtttaatatagtatgtgtttataagaatgtctcttattatacatttttgtaaaaagtggtgcgaatctcacgggtaaatcatgtgagcatacagttcgcgccacgatattatgtactttgtacttataaaacagaataccataatttacgtaaatataaaaattaattctataattcaacctttttcattacacgtttatattctcctaaagttgtaatccacttagaaacaccatatatatcaactacttcaaaacatacgtaattaataatatcatcttttaaataagttatcaacaagtaatgtgactgagtttttatctttttcttttttgctctacctccaacaattgcgccaataggaccaaataaaaccgcccctccaaccgcacttccgacgctagaaacatactgtttttgaatttctgtatctgtcttaatagttacatctgttacattacataggggcaaactaaaactaaccccacttgattcaatttgtattttgttagcatcattaaataaaaaacaagttgccccttctgctaaaggaagtccagtaatatgggttacgtaaagttttttgggttgtttggtttgaatttttttgttttgctccttctgtgctttcgttctacttaacataagcactaaaccaattataataaaaattattgatggcggaatagcttctacgatattcgttttagatattgcggtcaagaatattcccaaaataccaatcgctattaaaacaatacctgttatttttttgccacctaaagaagtcttgcttttttgattaatctttgttgcatagtcttcaccatacttcgatttcatcatatcatttacagttttaggttgagattgcacttgattttgagaaacactgttattaaaagagtttccacaactatcacaaaacactgccccatcttcatttttcttaccgcatttttcacaatacataaaaattccctccaactaatatctaaaatacgatagatatgaagtcaaaatccagcctgtcacgccattatatacaacctgattaaaaccattttcccaaccaatgctctctacccttgctcctagaggtacagttgttatggcgtacgcagatatacttggggcacttcttagtgatacccattcttgacagttgacaacatacatataatcttttccccaatcggaattatcgcaataatggtcattgtatcctaaatatgatgataaaacccaaccaactaatccattatatactacttgattaaatccgtcagaccaaccaatactctccacctgggctcccaaaggaatttgagttagtgtttctgcagaagtgcttggatatgttcttaacgatacccactcattacaattaacgactaccattgaatcggcaaacacggagcttgttatgcttagcacaaacattacagctacaccgataattaattttgacaacctttttttcataatcatttcctcctttatatatttaagtatgtttaatatatcatatgtatattaggatgtcaatgattaccaaaaatatttttatcctgtcgttcttaacaacatcccaggatataccactcttgcgcctacagtagcagctaaggctttatttacaagggctaatacattctcgttagtttgtgtgccctcaaaattttcccacttttcagattccgagattattcctttctgcttcaggctttccaaatgattttcagcccaatattccgcgccggtgcaataacaaccgttgctcgccttatcaactaaagctaaaatcatttccactgccgcataagcctcaggatttgtcaaccaataatctttatcatttaaaaaattcttgtggtataaactcattacatgtgggtgtgaccaatgtatacgttcgtctccgtctcctttttcttttttaccgccaaaacacttgtcaacaagagcaacaagattacacttttttacccatgctcctctatcccactcttcgttgttatttataacctgataaacatcgctcgtattagcgttatctatagcgcttttattcaattgatataagtaattataatctatattttcacgccgggctacttcccaaagtgtttcgttctgtttaacttcaactactcttagcatttgttttttatcctgcctcactactctgtatgttgcgccatcggttccgagttcaagtattttagtaccataattcttaaaagccttaaactcgcatgtaaccattacatcatacccattttcggcatcttcgttaattttataattctcaagcgtgactgtaaacgattgcttttcatcctgttcaggtgtaattttatcttggtcaaccctataaggacgttcacgaaataggtcaatcgtgaagaaactctcacaattcatcaagtattctaacacttcaagatagtgcgttggcttgcggtaaaagccgccttcccacgaggcgacttgccattggtctcctggtagcagtaagtcaaattttattgtgtttagccctggcgtttttggtatgttgatttcaccaccgtcgattagcgtaagtgtttcattttttccgtttatcgttatttcaatttttgcaggaggtacaggaaacaatgtacctccaataaacaaattatacattagttatgtaccccctccgctccgattgccgcatactcttttactgaattcagcagcctgttttcaaatccatctaagtcaacatcagaactaatgtgattaacattattcatctcaaccttgacattagtggatgtatattggtttaaaacagctctttccgccaaagatttaattatatccatattatcagcgattgatgaaagcgagtttgcagttttatcagtattttcagcagtctcttttccgtaattgctaatgtcgtccaaattatcatttgagcccatagcgctgtttgagtaatcccccaaactattattgtaatcatccggattaggtatttcaaatcccgagaacatattagacatttcactttcaagattacttccccaattatatccggcattatatgaatcagtataattaaatctaaatgtatccaaatttattcctattttacttaattcttcatttatatcaagtttctgcgcgacttcaacataacttccatttccatatttttgcgctaagctgtccgccgttgagctcaatccgtcacgccagccggatacagcgccggcaagatttgagccaaacacagtatcaatcgctcccgcaagatgttcgataatattgagcactatgtcagccatatccctaaccaagtaaattatagatgatactgggtcattcaagatattgccaaaaaaattagcgaaagctgcccatccgttctgtaagctttcaactactgcaaatccactttgcaaaatagcaagaaaaatatttcctataacagctccaactgtgctgaaagccccggcgattactcccgttgcactgattgaagtaccagcaagtttgtttataagggctactaccgcgtaaattattgctattaaagctattattgctacgataatccatgtaatagggcacgcaagtaacgccgtatttaagccccactgtgccgctgtagctgccgcagcagccgacgcctctgtacctgtagctgccgcatgtgcataactagccaatgctaacacaagttttgttcctgcaacaacgccttcccatattgatatcgccattatagcgccttgatataataacatcggcgtcaagataccccaaacaacaggtcctatcattgaccagttatcatatataaagccgccaatactgcttatcatatctagtacgcctgaaactatgttgccgacagtccccaaagcctgacctgcgctttgcgagaacgcctgaaacttttcgctgttagcgatttcgctcagtttgagcataattgggtcaaatgcttttaatgctatatttttaaaacctgtccacacttgtgagaatgtcagcggcatttgcttaaactgttggttgattgaatcagtcgcgctaagcatagcatttttcacaatatcagatgttatttgtccctcagccgacatatttcttaattgccctatagggacgttcatataatccgctacggtttgcattatattaggagctgcctcaaacacggcgttaaattcttctcctcttaacacacccgaccccaaagcctgcgttagctgcaatgacgcacttgccatttcctcttgactggctcctgaaattgcgaactctttgtttaagttctcggcaaattgtacagtttcatcattatttttaaatatatctcctgcccttaatccaagttttgcgaccgtatccgaaactgtcaaataatcggctctggaacgttgtgcagacgcaaatattttatcctgcaattccttcacactaccgccgtcatcaactgtcattgaaagtcttgcattcgtttgagtgacagaatctgataactcaaccgcttttttagctcccgcaataagagcggttatgcttaaaatacccataaactgacttttcaggtctcttgcgaaaccggagccttgttttacagaattattcaagccgtcctgttgttgcttagaacgtgctatatcatcttctattcttgaaatttcggctccggcaatttttaactgctcactggccgcctgtatagacgcggtatctattggattattggtctgattctgcaattcagcaaagctgtgtattgttatatctaacgcggatgttattgattttaatactggtgtcatgccatcagttaatctgatagatgacgctaaagttgctcccattactgtttcatctccctccgcgccttgtctctagcttctttttcttgcttaatcttaatatctattgcagctatgataaatgccctttcattctcggacaaattaatatattgagtaggcaatagatgaaattcatgcaagcaataataggcgtatacgctctcggggtcttcccccgttattagttttttgcgtcttccaccttatcaacaagtccgatatcaaaaccgttcaccctctgaatttcttcgagataggcataatattctccgggtgttagcatacgcttcaacagtctctctgcgccttttactccataactgtcctgcagctcagctgagttgaggtttggtgacactgtacatctaaccgccaaggcacataaataggcggactgatttaactgcggcactttaattctctttttaccgctcgcaacttcctgcatcttcatatgttcatctctcagctgagcgtcttcgtccgtagaaattggttttatctcccattcgattggctttttattatcatcaataaatctatcactcgctacatatttttcattttcacattcaagagcgttttgttttaaaaatgctttaatgtccatacttatttaacctccaatgttctttcttcaaatgtttttgttatttcaaagtcgtcaaaagagaaattaatctcctctgtcagttcttcggtatcaatgtccacagcggctaaaattatatcgtctaaaatacaattttttaatattactccctgctcagtcatacatgaactggcatcattgttatagacttctatatccattgagaacatttttccgcttaatgcaaattcttttaccttttgtctttgggttgaatcacaataatacaatttagcagagccttcgccttcccaagaaaatgctcttgttaccttgccagttctgcctaaaattgaaacttttttcttattaattttgcattttgcgctaagattaattaatctcgcataacaaaatctatcaccggtatcattatatgtaacccacacttctgcctgcgaacccgaaatcatcttgtccgcagttaaatactgatttgtacgtctttctaacgcttttggcattttaatacctcctatgcaacattagccataatatatagatgcgtcattacaccggcaactgttatctttaattcgacgaaaacagcttttttcacgtcaccttctgacacaataacattatcacttgtaaagttatcaattgcgcccacgccggcaagggattctaaaatctttataatgtcatttttgagcgctattctactatggtcatcgttgttaaattttccgtaatatttattgttaaacacattagcaattgatgtgcctatgacatctataactctaatagtttgatttgatttaaattcgtctccaaattcatcagacgtgctcacaaatgtattaatatcatccaatacttttacaattccattcatactatggaataccagcttgccgctctctaaagcctgtgcgagctgtgattgagtataattagtatcaacgctgagttcgccgtcatatgctgtattcgcaagactgtcttgcacggcacaaccggcctctgcgccggctgtccagtacaccaaatctgagatattagcgtcagaattagtgcagtcgttttccacgctgataatcccatattcatcagctttgttgtaatcatgcaatacagtctgaaattttacacctaactcatcacgcatacgctttgtaaatacagcccataacgatttaattttttcgtcttgtcctgcatacccaaggatattaaaagtatagctttcaagtttatctaaaaatccttgataatcctctcctgttacggtaccgttaccgccttccgtcaatggcgttcctgcagttaccgtcagtgagcctgttgtcttaaaatccacataatcattagatgtaagctctgccaaagtaccaacagtctgagaatctttaatacttccatctaaagcagtctcaaccacatacaaatcagcattatcaacatccttggttacgattatagttatatcattacctctagttcccgcatatttcgcagtggctatattattgctcgctttaatacctatccccatcctgtaacataacactgacttagcgtgtaaaaacagttcacgcaaattacgcatttttatatgattataagagtatccaaaaatcttctgagaattcttataaaaatcagaattactaacctcaaatatctctccttcaactccccagtcaagctcaaatggcatagccgccacacctctgtcggacatgacggccgttgctcttggggtagagtaaaagtttatatacgtccccggtaaaatcttgttttgtgcagtgaaaataccgcctcctagtgacatttatttcaccttgcctttcataaaaattttaattgctttctctgtttcctcaatggaatacagttctttttcatctaatattaccttaagtaaatctgcacgtaatgcaaatttttttgaattaatcagctgcttttttgaaaacttatcaatgttttctgtgctgtttttaactgttgctgtcaagatttacacctccatattccaaatctttcattttctcgttttcatccggtaaaataagatttactcctaagttgtagttcacaaaaaaatgcaaaaccccgtctataatttcatagtgcatattagtaccatgcagtttagatttatcgcttaatgttatccattccattccaactgtcagcttttctccaacagcatacaaaatctcttttttgtcatttgaaaaatggataatatcaaaagcattaatacaatcatgtctcaaacctaaataattttttgtatcactgtttatcagctcaaccaaaaaacatggcggccttaatttttgatttacattatttgtataaacagaataattaaataagttagacaagcaaccggttaacccatataatattttttcaatcaaacacctcacctaatttctgtaagattcgtttttcaagtaactttggcactattttttcaatttcaatttcagatttagttaacataaaccgtccagtcacccagccgctatgattgcttgttctgtgcccgtactcaacatagattgcatatttcgtggcattatatacagttattcgccattcctctccatgttttaccgcagagcttacattccatgaaccttttaagtgccctgataatacaggcgttttctgcttaacttttcttagcattcttgctgctatctcgttacaacaatcttgagccagcttatcataatcaactttttggaatgtttgcagcttatctctaagctgctctaactctttataatcgcaactgccccaactgcccattatatccaatcctctacaagagacaatataatttcctgatggctgccgtatactgctggttttccgcttttttcatatgtatttgttgcgccgttctgagttataacaagtgttgttccttcagtcacattaatgtccggcgaacaaaatagttttatctcttgtactgccttatatgcgccgtcttgttccgatacagttgatatatttttataagatacacggcacggtacatcttccgcaacgatttcttttatttgttcagtgattttagtatcttcattttgtttattaacactctcatacaatgtcatgcggcctgtgtaagtcttttctattgccgctctaaccatatccgttaccatactaaacacctatactttctaaaataacctttgtcaattttacacatctgttttacaacttcatcaaacctctgttccggggtattatcttcattcaaagcaaatgtcaccgatgtatcaccaacgtttatctcctttaccgcggcgttaaaattaaaattatcgccgagcaaatttaacatctttgcagtttttaaatattcaccgcaaattatatttgcaactacactttcagtttcatccggtatacgctttgtgtgacatatattaagtatcttagatgttaccaattcaacagcttgttccagtagtcccgtattaatttccgaaacaccaaaacagtttagcatttctgccgcgctcgtataaatatccatatcaacctctcctaaatcttatgtttaaactccactattctaattttcttagcttcgaataccggtttccagttctcggcttttgctacttctgctcttgatggtccctcagttttggcaacatcggcattagtccacgagattcctcgaggatgtaatatatatgtcttacggttaataagataatcaacacctgagcccttgcgtttcgccctatccgtctcagttgaaacaaaacccaccggacttccattgccaagcgctatagcgccatcgccaaacaaatatgtcgagaaaaccatatttgcgccgctgcctgtatacggacagccatcatctataataatgcgcttacccatatatgtattaaatggtgacgcgtcagacggtctttgtgtttcgattaaatcttgttttctgagagctgattcaacagcgctgtgcattgctatcgctgtgagctgagacttagcatctcctaacaactgctgggcgtcaataaacgcagctccggaccatttagaagcagctcccgtaccacttgaaatgtcaagtatattactgcttaatcttgtttcagcggcagacccctcgctggctgttgtggttccaaaaataccctttagaacagcgatgagttctttctgcatatctcgtgaccaaaaacccgcgataagtgaaccgatagccgccatcgggtctgaccctgacattgctgccgacaaatctgttgcgctccacatctttgctcgtctcagtatcaccgatatatctttatttgatgtaattttttcatctgtcaaatctccgccttcaataatttgttctgattctccgttcaaatcttcataaaacggcatttgcaccattggcgctgcctgtgacgcgagtgtgttatactccgtattgttccttattattccgctttgcaccagttccgaaagctccattgttttttcaacaacgtatgggttaaacagctccggcactattatatctgttaatgttgttcctggcataataaatcatcctttcaattttaaatttttgttcccgcctcagccgctaaagccttggctttttccgggtcatctttaagcaattgtccctgttctgtcaagttaaatgtgtcttttgcaaatggattaattgactttatttttccgcttctaggggtataatcaacctgaacttcattagttttaaagagaaactttttactttcctgcatagctgtcagctgttcatccactcctgacaccttgccgtcttcatcaactgttatcttatccatatcaaacaactttgcaacaatatcaatgtcctgggctttatcggctattgcagttttaattgcagtttctttcttgagtttgtcaatctgctccttgtgggtctgttcggacttatcaaatttttttttccagtcatcagcagcctttttgattttatcaatatccatatttttaaagttttcaatttgtttattggcttctttaagctggaccttaatattgtcataatctgcatacttgtttttaacagcttcgacatctttgccgttctcatccataattttgtcaattatttcttcagacaactccaagctttttagatattcccttttcatatgattcctttctcgctacgctgatttacgtcagttgctttgacctgcgctcgtagttttacgtcattgcggacaaattttgtatataaaaataacgcctgcgatattacagacgttaattaattatttttgcaaaccttccctctctataactgtaaatttatttacgtatacttcaatgcttatcgtctgaaccttttcgggttcaacatcacaattaacagcactgacatactttaatctattaccatcaacatatacacctaagttttctccgcttttaattatcgttacatcacttccaaaagtgtcttatgtttgcttttcagccatcatctcacccctttcgagcataataaaaacactctgcctatttgcaaagtgcttatttatataatttctattgattttatttccgataattcaatttccatcggtatatcttcaaaaccaggcttttgggtttgccaaatatcaatagccgcaccatcaggctcgttgtcaagttcagagacatagttaaacagcttaccagtgattttttgatcatcgacacatatgattaacaattctttgttaatcatatctttgatattattcataaatttgtcaatactcatatcatatattccccctttggatttgatggtaccacgtgaacgccttttctttttgaataatgtattattcccttagttgtttcgatgctattgccatctttgtcgatatattttcctataacgtcatcatgctcaaaccaagttcgttctttccaatcgccattacgtttctgaaagaaaaatccttcccctgcatacatatctattagttcctgtggatcagcggttaatatgcttcggccctcaatatagttgttagttccaacaatatgcttatcttgctgccctttatttaacgataaattataattttctttaatatttttcttaacctgctctttaaatttattatattctttttctttaggttcgtcaacatatttagatttccactcgggatatttcatgtcggccggaacagtataatatttaccgttttcatctctcgctgctcgtgtctcatcttttgtgaattcatcaaaatatggcactgatgttgtccgacaccggcagtgaaacggtggatggtttattccgacttgtaagtccgacgtcttaaaaactttgccgtccatgtgccggcatatttcggatgttctgttatctagtgtcgcaagtatttcatattcatcaacacctaattcttgatacgacttcttttgacctgctgatctaaaaaatgcgctctctgtgaaagcgaggttagaagcctgcgattttgtcacaccaaaatcttttgtaattttagctactaatttttgtggattttctcccgctataaaattctgtgctaaatctttttgaagtttatctatcaactccggcctgtgttttccccatattcgctgactaaaggttctattatcagctgtccaaggctttgataagattttagcaacggttttatcatcaagtatagaaaaagatgagcctacaccaaaccctttttgaaattcaaaaattgatcgataatagctatctttatatatatcgtttaaaagaattgatatactttccgcttgttttgcaattacaatctcaacttgttgctgcatttgaatcttcatagcctcaagtcgtgatatatgtacctttgcgctgacgttttcaagttcttttgaccaatcgctcaaaaccccattagtttcgccgtactttatgtactcctcaatactccaacgaaattctttaagttcatctcttgataataatttcttcgcttcctgatatgttatagcgttattaacagctatacgctgataccactttgcgatttcagcctcgcagttagaaatagcttgtccatatattttttcaaggtatttaacatattcagcagacttgttatattccgctttttcgagcaattcaaaacgtttatgccagtattcagcgttattattctgcttcatcggcgttcaccataccaaacatgtcaagttcgtctccggtcatcgttttattatcttcctcttctatcctttgtagctcacgttctgtattctcgacccaagggtgatttgcaacaatcgttctatttgatataattccgacagaatttttcgcgatttcgcaaagctcgctatcggtacgaacttttgtccgcgtccatgtttgtattactttatttacagacacaccataataattacatatagcccgtacaagctccgaaaatccagacttaaactcaacctctgtcgctcccgctttaagttctaaaagcgaatataaataccccaatgcagcgccagaactatttccaaagttttgcgggtctgggtcaattcccatgccctgctcaaaaattgattttctagtcatctcaagcattatcttacgggcttcgacaggtatatctattgtaagcgtctgcaaatcgcctttactttgcccatcctcttcgtccgtaccaagtttcaccgtcttgtacattttaagctctgacagaaacttgcttaaatcttcgctctcgtagccggaaagtatgaaaataacctcttgtatatcctcaaggtcatttaggaaaccgctgtaaactttatcgtatgtatctatctggtctttgtttgaatccaaatcacgcgtatgttcgctattgttataaaacgggataaacggaattcgcccgaaggggttgggaacacttgatacaaaagcagattgctgcatgtctacatcataacaattataacattcatattcatgcaatgtatctatgtctccgtcttcaattttatacgagtaaatcatatcggatgtataatattcatatacacaatacgcttttccattatcgtcaagctcttcatatgatcttaatacagctattaacttatcatctattgtcgtatcaaatatcggcgtgatttgctttgaatccacaattgtatatttaaagccctcggtatcactccaataatatatccatgctacccccgtattggcggccatagcacaaagcctgatacagattttttcaaatttatcccctaacgtatcagaaatgagtgtgttgactttgtcatttgatacatcaaaaagtggcggtgatgtaaatatgtatgatgctttctgatctacaagcaatcgatgaaaattacttgctatcctattatccgcattgcgcagcggcctatcctgacactcattttttctttctctatccttaaattttatatcgttttccctgttataatatctttcactttgctcggccatttttataaaatccctatgacccggctcgtactttttaattaactttttaactacatcaatatccaattatatcacctcaatactgatattccagattttttctgacttgtacgctctgcaactcctgttgtcgcatccggtgcgtcatcatgcttatttttaccttctttttgataactcgtcatagcctcataatattcgggccacctatcacgccaatttatgggatagtatatatgttccatcacccatgtactatttgataatatacgcgcctttttgtttttactctgatggaaccagcgaactactgtgtggttagaaaataactcatcttgcataattcgcttaacgcttctggcaaatccacggccgccgttattgctctcaataacagccttattcacgtcaaactcaacaagccgtttagctgtttctttttctgttatttccatgctgtctttagtgtagtatacatcaagtatatacgcttcactgttgtaaacgccgtatattatattacacagataatcgcttccttcgtcagctgtatcacaatacgacctaatctctgtaaacaacgaattgccacttccgtcagacggtatgtgctcataagttttgaaatgtgtgtacaaacgtcctttttggtcaatgggtatttgctgataatttgctgacgcaatatcggctcccattgcttttatcttcatttcataggatttctttgataatatctcgtcacaaagcatatctccattatcttgaaccgctttcatttttataactctatgagaaatattgtttgctctaaaatatcccattgcctttcctgccaaatctcctgtggcccaacgcgtcataataattattatttttccgttttcctcaagacgggatagcattgtatttacaaaccaatcccaatgtttttcaagaatagtttcgttgtacgcttcttctgctgatttaattaaatcgtcaataatcatccacgtacatccaaaacccgttgcagttccacttggagaagtggcaagataattattatagccatctgtcaggctccataaattcattgaaccgtcaccgcgctttatttgaactcccggaaatatatcagaataaattattttgtcattatccgctttttcctcttgtatcgcgtttctaacattttttgaaaatgtagtagacaatgtttcgttgtatgaaccggtcataattttctcgttatgattgcgtcccaaaagccactcaacaaacaagccggcagtccttgacttgccatgccgcggaggtaaattaacaatcattatctgttcatcactctcacaaaatctttgaaattcattacaaagatttatcagataatttctgttaattttgtaaaattcaggagctaataaatggcaaaaataaaagaactcacgccgtgcaagctctttttgtgcttcaaaacgaataagctctctattcattatttatcagctttcttaattcatctgttgttaaattcgatattggattagtaatattcatatctccactatggtttatttcctgcttgagtgaaaattcatccttacacttacgttcaagataccatgttgatacaccaacatctcctgaattaatctttcttgcaacgtttattttagccctcattttcacactttcttttaacagctcttttcgctccgaaaactctttatgttgattacaataatcgtataaagtgctaggtgccacattcgcataaatacaggcttccctgtcactcatcccccaaataaagccctcttcaagtttttggattactctctcagtaatttttttcggtctggccatgtatctacacctcctgaattatatttacaaacaattggcttttttaaatgctttaaagatttttggcgattgatatgctatccaatcaaccatctcctcatttaatgcccaactttctgttatttctgaacactcagctaagccgctctcaaatagaaaggcatgaattatctcatgtcttaaaactttttttcgatgtgttttcaagtctccaacattttgtggagcttcagcaaaaggccagtgtacaacgatggattttgtagttttatcacaatatccgtcactttcttccagtcgtgtgtcttcgcttggtactctatattttattttatattttgtccctaatatcttaattttcataattacttcacccttcccaatcacatcacagccgcccgcccctcagcaaattttatgatgtacaattcccacaatggccaaaactaaaagaaccgccccaaaaaggaaaacggctcttaaacaaaaaatatataaaaggagaaattactttgcatacctttcataatacaattataacatgtaattttcggaaaattcggacaactttaaaaatttattatgtttttttcttatgccgctttcatcaccattgcccactttaaaagcaatcttttggaatgtccacccctcaatatatcggtatctgaaaattcgcctgatttcgctgtcagcaatgttgttaataaattcattcaatgcgtgatattcggattttaataaccccaactcttttcttaacaattcacgtgtacggtcgcactcagctgtttccactttgaaattatgttttatatacggaaactccttgtccgacccctgcacaatgtcagaactttcaagcatttgtatctgttcggccaattcctcaatttctgcttttaaacttctgtactgttttaacctttcaggtgtcataagatttatcacatccagtttgataataattctttgtctgttaaattacttttttatccatatagtttcagtccttttctaactcgcacaaaaacgcaatattacaagccaaatgccacaaatgcggcagtccgctttcctcatctacgcctgacgggtcatttatatatgacacaaagtgtctgaaagccgcgtccctatacctttgcggctcaacgtctttccagctgtcactatctccatacttttttgctccatactctcttaccatggcaaccgcagtaattatttctgtcgggcacaaggtaagtttcggctttccttcgtcatatttcatcttgtccctccttgttataaatttatttctcaataagttctacatcacttagttgcacatgaataacacaatttgcgttttcgtcatatagttctccgtcatattcgattctatcttcatgaatatttttaaaacatctactagcataaaagacatagtttttatttttataacgaactatactttgttgcataattgcttgtttaacttgttttaactccatcttacaaatcctctatcctgatatatattccgggcttttcagcccaaaatttttccacaatttcacttgccaccaaattatcatctgcccaataccccaactttgtcattacatccttgagtaacttctgtaaattgtccgtatccggcttagttattttatactcaccgtctctgtgattttttctcgggaaacaccattttacaataagccgaactccaccaatatatttttttgctggaacaaatctagctaaatgtgacataagttttaaacgggcgtcttttaaattatatggttcataaaaaaccggtttaccttttatcacactgactttcttttcttgatgagtaacagttggtggaataattgcaacaaaaaattcagttatcataatcaacaccactccaacatcctgattcagcattatattttatcgcttcggaattttttatattattccagatataatttaaaatttcaggttgcattataagccatttaataacttcactattttgtattttaaattctttgcccggaattgaatgtctcagttcaggcattcgtttaactgcatctaacaatttgcttctttgtgttctcatattttttgttcacccctcagtttttgttttactcttgaaaaaattttttgtcagtgacagggggaggcgttgttgtgcgtgagcttcgcacaacgacttaccccactgacccgtgagggaaagggaaaattatatatttatatatataaatttccttcccgatttcccgattgcgctctaacccacatttttacgcggttttcaagacttgagggaaaaagggaaatttccttgttttttcccaatttcccttgagggaaaaagggaaatttccctttttttcccgatttccctctcgagatttaaattatttttcatatataaatccgtttttaatatacagattagagcttgaattaacataatttcttatggttttttctgatttttccatatattccgcaatcattttgagtgtcacatcaccatcaattttacaaacttcatatgccgtttcaattgtttttttattttctctttgtttaacattctttttatttgatttagatttccaagaatgagtatcagattcagctgataaatccttaagaatatttgtatcatctattctgtgaatagggtaatcgaaccataaattaattggttcaaatttaggaaattctcttaacgttccatctatacgccatgctgtacggcttttattttcatctttaaccttcttaatatcttcaatcatcagtttatatgtattactctgtaacaattctgctgaaagttctaacatagtcctagcgctgcataaatcatcctgagaaacctcgttatctttactaaaacgttttatccatttgtagcatgttttacacactaaaacatcttcctgttgttttaaaacatcttctgttaattctaattctatcaaatcaataagagcgtcagggtcacgagcaaaaactccgctgccggatgccctatccatacttcttttgccgccttgtgctccctttgaatgatgatggcaatatattaccgcacagcccaattcggtacagaccttgtcaaactgattacaaaactttgccatttggtccgcgctgttttcatctcctgtaataactttatatattgggtcaataattattgctatatagtcttttttcacggctcttcgaattagtttaggcgccagcttgtccattggcgctgattttcctcttaagttccatatatcaatattattaatgttatcaggattccagtttaaagcagtataaacatctttaaatctatgaaaacagcttgccctgtccaattctaaattaacatataaaactctgcctttagtacaattccatttcagccatttcttgccttcagctatagcacagcacatttcaatcagagcatatgattttccggcttttgaaggtccagctataagcattttatgaccttgtcttaatactccatcaataagagatggtgacaattcgggtagattatcccaaatacttgcaatgctttcaggttccggcaaatcatcattaattgtttcaatccattctttccattcttcgaaactggattttccaatgtttgtagataataaatattgttttttcccatttcttataattcctggcattctagataagcgtgatggatttttattttgtttatctataattaaaccattcttttcacaaaccttatatagatattcaactctttctctatattcactataattatatgcctcaattttcactatagcgtggagacttttccctgcactgtacacaagacatgcaacaggtaattccagttcctcaataatagctttttgacgccctaaatccattacatctgattcaaccaaagcatatctaaaatccgtaacgttttcattttttatacctttaccatcaagagggttaaaacgtatccaagctcctgccttttcactataatcaccaataaccttacatatatctccttcacactttgaaagctcctgaattaaccttccggccgtcctgtcacacaagcctttagacgggaggtactttccgtttttctcccagctccgagtgacatacccaacgttttcatttgcttcaaacagtgtttctaaatatgtagttaattgttcaacaggattccatttttgtggtatgctaaattcacttgtttcaatccaccctttatcgattacaactaaatcatctttattgcctatctcagaattccaatcaaaagcaacatcttctttatgaaatttaaaaccattatcctgtgccattttcactatggttcctgctgttataggagaacttgaaccggaaaaagtattccactttttctcacattccccagcatgataacggttagcgtcacgtttgctccaattatcccaatcctgtactgtatatccttcatatttaagtgccattccaacattaacccaatcctgataatcaagaaatgatggttctatatattcaagcagttcaatcaaattaatgttattttccatatcctatgctcctaattcgggattaaatgtagcggggttaataccatttggaactctccacccattagcagatattctcgcaatcaatttgcttgcagcttcaaactgccatgttccaacatgtttaaatcctttttgctctaagcatctaatttgttttggcgttgtcagtccttcatttttacgtttctcaagtctgtctaaaattttcgcagctttaccggagttttcaatttcatcaggcataatacccagcttttcgagtgcgtttttctgcttgtccgttggcggtgacatttcccagccaaatgccggaacataccctgataaatcttctgcttgtatactcatttcaaattgtatagggtccactaatttgcgttttctctttttcatttccgacaactgcttagcaagagcttcttcacgctgcacaacaacatcttcactggcttgaacttctgcttcttctatatcaatcggacagcctgaagcttcaagattttcagtcattttttgagcaacttcttcattttcgcatattagatgagccggtctacaaagttcatgtcgttcagtgtgccaaaggaaatcaagtattaacaattcagttttaccggtttcaggtgataaacgtgttcccctgcctaccatttggcaatataaactacgtaccttagttggccttaatacaacaacacaatctacactgggacagtcccagccttctgtaagcaacatggaattgcaaataacattatatttgcctgaattaaaatcgtttaaaatctctgacctattatcactatttccatttatttctgcagccttaaaaccattttcattcaaaatattgcaaaacttttgactggtttttactagcggcaaaaaaactactgtctttcgcccatcacaatattttttcatttcatccgcaatctgatatagatatggctcaagtgctgtacctaaatcgcttgttttaaaatctccggcctgtgttcccacttctgttaaatcaagttttaaaggaattgtttgagctttaattggtgataaaaatccttccttaattgctaatgataatgaatattcatatgccatgctctcaaaaaccttaccaagatttttcatatcacctctgtcaggcgtagctgttactcccaataattttgcttcattaaaataatctatcactttttggtaactgtctgatatacaatgatgtgcttcatcaataattatagtgtcaaagtagtctgtatcaaattggttaagacgtttctgacgcatcattgtttgaacagagccaacaactatacgataccagctgcctatacaactttcttctgccttttcaaccgcacattttagcccagttacttttttaattttatccgctgcttgttccaatagttcggctcgatgagcgagtataagaactcgctcgccattctttacacatctttcagttatctttgcaaatacaatagttttaccggtgcctgtaggtaatactagcaaagttcttttattcccttttttccatttggcaaatactgccttttcagcttcttgttgatatggtcttaattccattagaatttacctggtgtgaatgatttttttggtgcagattcatcgggagcgtaaaacctttttatatcattataaatatttccattatattcacgatgtccaatttttgctcttcctcttgctccgacaacttcattccaattcattttcaatttttcaccatgctttctctgaccaatacaagtaaaaaatgcacacaacaacccctcacaacgactatgtaaaaataatctgttttgtataaaacaaattcctttgttattctctatttctaaagtgataattgccatattacaagccggaattttctctccaccttcatatctgccgcgttcaaaacctgttactttaaaattatagtctccatccggcaaaacgacatattccggtccatcattttgtatttcatcatcccagccatattctctttctgattcattactcatttttatttcctccaaattttattatttatttttcttcccaaggaagtgtctcatattcaactattactttatatacatcatcccaggcgcctatcagaaccccttctataaactcagtatcaaaattttcaattggtgtacccgatggataataacctttttgatgcacaacattttgaatcatttctttagtaacattgttttcaatcattaatttagctaattctttagggattccgtcaacattaattttcttcatttgttgtttatttgttttagtttcttcatcttgtttcggaattttatcaataacagcatcaatttctctttctatttgttctgtctgattaagtttaacaggtgtttggctctgtggttcaaagttatcaaatatatttgcaacatatttataatcaaatggcagctcgctttctaatccatgcctgtttttcgcatcccagcatggatgatgagttgtatacattacacgctttccaccttgagctttatgtttttttccatctttatcaacagctacagaaattgttttataatttgcaaatagaaccatatcagcccattccttcacaagaggtgctgtttgtgaagaagttttctttccgagtttcagttcgtatctgtcatatgcaccaagttcatcaggctgctcaaatttacgtatttgtgcatgtgcagctaaagcaacatttattcctgcctcaataacattatccagcaactttaaaaatcttccaaattcttcttttacatatacatatccggtaccatatccaaaatcctcaattccatttttaccgtacttttcaagtatgttttctgtacaaagctgttcagcccaatcaattgtatctattgtaagtgttttacagcagccaggattttgaataacgtaattaatttcttctaacaattccatccaactttgcgggtttggcaatctagatacattcatatgttttgtgcttccttctgtatcaataaacaacggctccggaaaacaagataaaaaagttgatttacctatcccttccggtccataaactacaaccttttcaggcgttttttgtatacctttaattatcttcatgaatacctcctgcttctacttaatttgaatattttgattttcttcaatatgtaaaccttcaagtaatacacctgatttaatagcttttttggcctccactttgtcaaccgccggttctgtatattttaaatactgcttgtctactttgttaatatcatcaataacaactgattcactcttacgatatgtaatattaacctttggtgattcaaacttttcacccgcaagaaattcatttaaaaatttcttaatactctccgctttatttttggccaccctttcacgctttgcaaaataatctttttcggatttatacgcattaacctcagccatcaaatttttataatagagagccaaattttttattttatcatctctcatcatctgcagcttatcagctctttctgtatcaatcccaataacctcgcctgtttcttcatcaattaagatacattgttcaatttctgcgtcaatttcatataatttcatgctaaatttctccttttcccagtttgataattgacaatttaatattttggtggtattattaaactgattttatgttatatactttttattgcccgtttagtgttccagcacttgcgggctttttattttctaacaactccagcttaaattctctgtactgttcattaatattcttgtccatatatgccatagccgcaaaattgcagtctataacaagcctgtcaaactttggatttccacatataactattggttttataataatcacctcacattacaattttatgtattcttttgctttccggccttttggtttctctataacactcttcgtcgtctacctccgcgctaaaagcttaattgactatttatttcatcaacttttttgtctatttgcaaaaatgttttgttatatttaaaacaagaacttataatgttttgctcattagataacaacattaatttgttccacaattccgtatggcatttttttaaacgtgcaaattctttatatgaacagtttggacaaaaccagcaacctccgcgttttgcgaatttatatataggagaaagtaaatcatatttcttgcataaatcatatgccattttttcagtatagccgtatctttgaagcaacgatattttattcgttccttcaagtttttttaatcttttttgctcgtctgtcgcgattccgatatattgaataaaaggtttcttgacagtttttaaaaagtttttaatcggtggaatttttaactgactattcgctgcacacattccagcaagtaaaaaacctgcatatttaccgttcctttccggttttttgctgcgagtaacgacgtgataaaacaaatctaaataatccttttcgctacgtaaaatttgaacgtcatatccccattcacggaattttggtatcgctttattatgtataaaatcaatgtgttcgggtaactcaccgcttatgttatttttgttgtcaaacatgacttcgctgaaaattatttttgaagccggtaaattatgaatacgctcaagtatgatgcttgctgtgctatcctttccaccgctccatgaatgaattgttataatcttatttcacctccacattaaaagttacactgttttgcgtacaggtctctttatttttctcattctcattttatctcactcctataccaattttaatatttctttgatttttttcttctatcgttttagatgttctgctacattcttcgtcagcaaaatcccaccgccgattatccggattgattacgaccttacgaacatcgtcagctatgggttgtctattttctgtactttcggcacaatctagaaatgcaaaaagtatcatcgtaagcggcactgcgtaaaatatgggataccactcaagcagcctaaccataactaacaatacagcgccgaccaccgcagttgatatacgtataatccatttatacatttgacttcacctccatataaatatttaatattttaaaattaggaaaactcgctataaatatttgtttcgccttttctgttgatttggcttcaacaattgcataatcagtcttaattatcggcaccccatcatcaggtatatagctatatttaattagatattttttcattttcaatcacctcttaagcatatttataactgtttatatgctcttgctcacgccatttataatatgccggtatatcaacataccatttaccaccttgcttatatgccggaaaagcttttttgtgaatccaacgttttactgtttgctcgtcgattccaaaatattctttgaattgtctaagctgcatttgttgaattttacattcttccattttcctcactctcctttcttatttccctctttaattgtttagaaaaactaaacagtttctgtaaaaaaatattgaggaatatcatctttagataaccccaataaatctacacatctagcaatttcatcatgagtaaattcagttttacaatttaactttgcgcttaaagtagcgtttgaaattcctaatgctgtagcaaagttatcctgtgttttatatcttgctcttatttttccctttaaatcatcataaatataaaaatactttgaatccatctctaacacctccttgtttagtttttctaaactaattataacacccaatttataaattgtcaacactcattttcagattttctaaactttttttaaaaaacacttgatatttttctaaacttattgtataatcaactgaaaagaaggtgatagcatgaatcaagaatttaatatgcgtttaaagaaagcaatgaatattagggcaataactcaatctgaattatgtgaaaaaacaggtataccaaaatctgcaatgagccaatatatctcaggaaactttaagccaaaacaaaatagaactcactcattagccaaagctttagatgttaatgaagcctggttaatgggatacgatgttccgatggaaagacaatccatttcagaacaagataataaccaaaacaaaaatattgttgctatcaatctaaaaaaaattagggcagataaaatgttaagatatgctgatatatctgcattatcgggagtgcctaaagaggatttacaggcatttgaagaggggacaaaacgtccaaaatccgcagatataagaaatattgaactagcccttgatattgagaaagggacgttaaaaggaaaaaagcagtatattccaacgggtcccgatgaatccattccgaccaaaccaaatgaaatagttgtcgacaataaacatattatattatcgcctgaagaatacaagaaattaaatgaatttttgggaagaagtgtaagagaaaaaaatgaaaaatatatagctcttaaaaaagaaactacagaattactagaaaaaataattgacttaatttacgagaataaaattagcgaagaaaaattaaaaagtttaaatgaaaacctgaaacgtatttccgaaaataacgaataatcatactggcaattatttctgattcaaatttaaatcaagtcatgttataatatccttgtaaatattacaaaaaaaggagattttagacatgaaaattgaagatttaaaagctataagttacaagattttaaaaggtgctcagattagcagccttccggtagatagtcataaattactatcttattatgatgttatacctgaaaaactaacagatgttgaaaataatctaaaatatctaatagcagacagaaaaacaacattgctcggagcaaaagaaaatagcacattaatatacaacgatactattgtatatagcgattatatgattatacatagattttgtgaaaaaatactcaaatcctctgatatacgtgatattgaaatattaacattattaataatgtcaccacccgttatagttggatatttaggggtatatgatgtaagacaaatgagcgaattatgcaagatacctccacataaaatacatcaatattatgatatatacgctcaattatatgccgaccccgatattcagcttttggaattacttatgccatttttgcgtaaatacaagcgcgaaaataagatgaggtttccaaggataaagagcattattcagggtttgaaggaaaagaaacttgatgaagaaaaagatgtgttagtatacataagagacagtgagactgtatatcacggtcacacatgtcccgaaataaaagatgaaatagatattaaagtattggatttatatactgctaaacaacttaattataaaccatgttcaatatgtttttatttagaataaaaaagccccggtgctaccaacaccaggactaaaatatacactaggagtgtacatagatactattaattattataacatatacactcctttgtgtcaatttataatacacaaaaaggagcgttatttttatggcaagagcaaagtataaaaaacgaagtgacggacgttatcttgtacaaattcaaactggatttgatgaaaacggaaaacaaaaatttaaaaatatttacgctaaaacaattcctgaacttgagaaaaaaataaacacatttaaatataatcttaatcgcggaattgttgttgatgaccaaaacctaacttttaaagaatgggcaaacaactggcttgatacttataaaacaaatgttacaacacgtactaggaaaagatataaaagcataattgacattcaacttaaatcgcttcataacattaaactcagcaaattaaaaacagttaatatacagaagaccatcaatgaacttacaacaagcgtgagtttgaccattaaaattttaaagcagattattaaacaagctatgataaatgaacttatttttaaagatttaatgttaggtgtttcattttccacgcaagagccaaaaaaacggcggcaacttaatgaacaggaacgtgaagctatagaaaaagcggatttttcggcaaaagaacgaacatttgtatatttatgcttatatgccgggttgcgacgaggagaagcgttagcgttaaaaagaaatgatgttgattttaaaaatgggattttacatatatctaatacagtaatatataatgataataatactccggagctgaaaggaacaacaaaaacgccggccggagtgagagatattcctataacaaataaattagaaagtgttttaaaagagtatattaaaacaaatgtaaagggaatgtttttattttcatcaagaaatcatacccttgtaacaaaaacatcatatcaaaatatgtggaaacagattatacggaaaatgaattcagtatcaaaaattcctatcaatgaaataacagctcaccacttacgtcatacatatgcaacagatttattttatgcaggcgtggatattaaaacttgtcaatatttactaggtcattcatctattaaaacaacacttgatatttatactcatttagatagcgacccggcaaatgtagcaaaaaagattgatgaatactatatatctaatcagtcaaatatcagtcaaaaataattttcaccattaattctaaaaaaagcaacccccgaaaacaacatgttttcgggggttattggttatcttatttaatgatttcagtaacaacgcctgaaccaacggttcttccgccttcacggatagcgaaacgaagtccttcttcaatagcgattgttgttgtaagttcaacagacattgtgatgttatcaccaggcatacacatttctacgccgtcaggaagattaacaacacctgtaacgtcagttgttctgaaatagaactgaggtctgtagtttgtgaagaatggtgtatgacgaccgccttcatcctttgtcaggacataaacctcacccttaaactgtgtgtgcggtgtgattgtacccggcttagcaagtacctgacctctttcgatttcatcacgtgcaacaccacggagaagagcaccgatgttatctccagcttcagcataatcaagaagctttctgaacatttcgatacctgtaacaacaaccttacgtgtctcgtctgaaagaccaacgatttcaacttcatcattaaggttaagctgacctctctcaacacggcctgtagcaactgtaccacggcctgtgatagagaagatatcctcgataggcatcaagaaaggaagatcgctctttctttcaggtgttgggatatagctgtcaacagcgtccataagctcatggatgcactgatactcaggagcatttggatctgtagatgtagattcaataaccttaagagctgagcccttgattatcggaatgtcgtctcccgggaattcatactctgagagaagctctctgatttccatctcaaccaattcaagcaattcttcgtcgtcaacctggtcaaccttattcataaatacgatgatataaggaacgccaacctgacgtgaaagaaggatatgctctcttgtctgaggcataggaccatcagcagcagatacaaccaggatagcgccgtccatctgagcagcacctgtgatcatgttcttaacatagtcagcatgccctgggcagtcaacgtgagcgtagtgacggttctctgtctcatactcaacgtgagctgttgaaattgtgattcctctttctctttcttccggagctttatcgatcatatcgtaagcttcgtactctgcttttccatccatagccaatacctttgtaatagcggctgtaagagttgtcttaccgtggtcaacgtgaccaatcgttccaatattaacatgaggtttgcttctttcgtacttttcctttgccattttacaatgacctccttatgtttaataattaaatttttaactttaaccaaataattccggcattatgaaattactatcccattgtactattaaattatagaaatttcaagacttttttgttaaaatttttaaaatttcaaattcgtcacaaaaatgacatttatcgtcaataatctcatacacagtcagttaaataaccgcatccggttttaattagtcctcgcttgatctctcttttataatcttttcagcaatactcttcggcagctcttcaaaatgactcggctccattgaatactgaccgcggccctgtgttctggaacgcagctctgtcgcatatccaaacatctcggatagcggcacgtttgcagtaatttcctgagcaccggttcttgcttccataccctgaatttgtccacggcgtgagttaaggtcacccataacatctcccatgtattcttcaggaacattaacaacaaccttcatgataggctccatgataaccggattacctttcttacagccgtctttgaatgccatagaaccggcaatcttaaacgccatttcagatgaatcgacttcatggtaagaaccgtctaccaaagtacattttacgtcaacaaccgggtaaccggcgagaacacctgtctgcattgcgccttgaatacctgcgtcaacagcaggaatatattccttaggaatagcaccgccgacaatcttattctcaaatacataaccttctccagccggaagaggttccatatccataacaacatgtccgtactgacctttaccacccgactgacgagcatatttatggtcaacatgtatcttgtttcttatagtctcacggtaagatacctgaggattacctacatcagcttctaccttaaactcacgcagaagtctgtcaacgataatctcaagatgaagctcacccataccggcaataattgtctgacctgtctcgtcatcagtataagttctgaatgtcggatcttcttcagccaattttgcaagggcaatacccatcttttcctgtccggcctttgtcttaggctctatcgcaacacggataaccggttccgggaattccatagactcaaggataaccggagcactctcatcacaaagtgtgtcacctgttgtagtattctttagaccaacagcagcagcaatatcacctgcataaacagtgtcaatatcttctctgtggttagcgtgcatttgaagaatacgtcctattctctctttgtttcctttaacagagttataaacatgggaaccactgttaagtgttcctgaataaactctaaagaagcacagcttaccaacaaacgggtctgtcataatcttaaacgccaaagcagcaaacggctcatcgtctgatgaatgtctaacagcttcttcctctgttctcggcacaacacccttaataggcggtacgtcaagaggtgacggcataaagtctataacagcgtcaagcatattctgaacgcccttgtttctgtatgaagaaccacacagaacaggtaccatttcgtttgctatagtagctttacggatagccttcttgatttcgtcgatactaaggtcgccctcctcaagatacttatccatcagctcttcatctgtctcagcaacagcctccagcattgcttctctgtattcagcagctttatcagccatatcagctggaatctcttctattctttcatcctgtcccagttcatcataataaatgaaagccttcatttgaatcaagtcaataagacctttgaactcgtcctcagctccgatgggaagctgaataggaacagcattacatttcagacggtctttcatcatggaaacaacattataaaaatcagcgcccatgatatccatcttattaacatataccattcttggaacctgatacttatcagcctgtctccaaacggtttctgactgaggctcaacgccgcccttagcacaaagaacagtaacacttccatcaagtacacgcagagaacgctcaacctcaactgtgaaatcaacgtgtccaggtgtatcaattatgttaattctgtggtctttccactgtgctgtagtagcagcagaagtaatggtaataccacgttcctgctcctgctccatccagtccatggtagcagcaccttcatgggtttcaccaatcttgtgcacacgtccagtatagaacaaaatacgttctgtggtggtagtcttaccggcatcaatatgagccatgatacctatatttctggttttctctaatgaaaacgctctacccataattttctccttcccgactaatgtcgtattacacgcaggcaaatcctgcagcatatcaagtattacacaccggcagcgccgccggcaaaacaatttccattatatagtttcctatattatcatttttatttacaagaaaatttgctcagatttgtctttgcaggaagccgacgcgtacattcggtacgctatggttccgaaaagactaagatgagtgaatttttaaagtaaaaattaccaacggaaattagcgaatgccttattcgcttctgccattctgtgtgtatcttctttcttcttatatgcaccaccggtgctgtttgtagcgtcaatcaactcatttgcaagtctttcagccattgttctttcagaacgctgtcttgagaactgagtaatccatctaagtccgagagtttgacgtctttccggtctaacctcaatcggaacctgatagttagcaccgccgacacggcgagccttaacctccagaaccggcattacgctgttcattgcttcttcaaatacttcaacaggatcctttcctgtcttttcctttatgatatcaaatgcatcataaactattctctgagcaacacctttttttccgtcgagcatgatgttatttacgagacgtgtaacagtcttgctgttatacataggatcaggcaatacatcacgacgagctatatgacctcttcttggcactttcttcccctccttcgctaggtttattcaccataaggtactcaatgttttttaacactgtcgcgcacataggtcatatataatcaaattttatatataaacatatgcacacatttttcaattagcgagactatttaggtctctttgcaccatacttagaccttgactgtctacgtgcgtccacacctgatgtatcaagagtaccgcggataatgtggtaacgtacaccaggaaggtcctttatacgtcctccgcgaatcataacaacactatgctcctgcaaattgtgtccgatacccggaatataagcagaaacttcgattccgtttgtgagacgtactctggcaaccttacgcagggctgagttaggctttttaggagtcatagttctaacagaagtacatactcctctcttctgaggagaagcctggtctgtaggacgctttttgattgtattaacacctttcaatagcgccggagctgttgacttcttttctattgtagctctgccctttctaactaattggttaaacgttggcaatatgttcacctccatacataatataataaatttataaaaacgcctaaggcggttttaactttttaatgttgcggcagcagctgtaaaaacatcaataccgcaggctcttccgagctcttttcgtgtttcgacaataataggttctataccgttttcacgacacattttaaatattgattgtgtcacagaggtatcagcgtcatctgcaacataaaccatgtcagcacgtccgcttttcaaagcatttttcacttgcttgacaccaataaccttatttctatgtttcaaattttccataacaaacctcaaaaataaatgtaaacggtaaatatatcctattacaccattcattacacgaaccattctattataacacataagagcggtttgtcaagcacttttttatctacttttttataaaaaattaaaggtaaagtaaataagaatatataactgaaacaagtgcagaattgaaatttcaacaaaaaactagacagaaaaattaaggtcatataaattatataaaaaacgcagtctatcaaacataggatagttttttctgcttttattatactcaccttaattttttatacactttattataaccttttcagcagtttaatcaacattatactacattataaaaaccaaatacttgtagccttatatgttttatataatttttaacaataaataatgtttatttcttaattaattaaactaagtcatattaatgttttctttctcttgtttttttgcataagatagtgtataataaaatgtaattttaataattgtcaaaaaattatttaggagatatgataacatttatatgaaaaaattcgtaagtatgtttcttatattttatataatatttctttctgtctcacctgtttttgcttatgagccgaagcaggttattcgtgttgctaaatttaacagcggaaactattttatttctgaagatgacggaaccgttaaaagttatgacaaagaatatctggacaaaatttctgaatataccggaatgcaatatgaatttgttgattgcggaacatggcaaaatgctgttaaaatgttgcagaatcatcaaattgatttagtgggcacaatgcaaaccagtgatgaaagactgcaaaattatgacttctgcaaatacgaatacggcgttacatacgcttcgcttgcctgtctgcctgataaagattataccttccaggattacacttcattttcagacgccagtatcggctgtactatagactatgtccgcaaaagcgagctttataattggatgtctgaacataacataaccggttctttaactttttatgataccgaacctcagcttgtcaacgctttgcaaaatggagaaatagacattatggcggcaagcgttcacactatccttcctgaatggaacatcttagataagtattgtttctctccattttatttcaccacctggaaaggcaactcagctctcaccgaaatgattgataatgctattttaaaaataaaactttatgaatctgaatttgaagattccctgattgagtattactttccttatatatctgttgaccctttaacttccgaagaaaaagattatataaacaattcaaacggcatagaactctttttcgatccggaagccgctcccataactttcgtagataaaaaaagcggaaatatgaaaggcgtaattattgacaactgtgaactcatttcacactctaccgggctcaaaatacaatataaatctttagttgacagagctttaattgacgattcaaaaaatcaatatgcttttataagcatagttaataattatacatcagaatatactaaagagagtgataacgaaaaaatcaccaaaccaatttttgaattcccattctatttatactgtaactggggatttgattacaatatcaattcttcatatacggtagctatgacttccggcagaccggcaatcagggactatcttgaacacactaatccaaattataatattatagaatgcaatactataaaagagtgttttgaccttttaaaagaaggaaaggttaatctcgttttttcaagcctatataccgcaaataatatactaatcaaagaaaaccgcaccgatgtaaattttattcctacaactgaaactaatataggaatcgctataaaatttaccggaagcgattctgaaatacttaaatctatctttaataaagaaataagcactattaaaagcgaggatcagacgcaagcccttttaaactacacaacaaatatggctccggaagcaagcttaagttattttatacaaacaaatacaggagtttttattttcattttacttcttatattcttagttcttttatttgcctgcatatggttaatcaggtactacgccatctcaaaacaaaaagcagctttatcatccataaacgatgagctaagaaaagcaaatgctgcaaaaactgattttctttccaggatgagtcatgacataagaactccaatgaacgcaattataggtatgaccaaccttgcaaaaaaaagcgccaatgtatcggaagaaactttagattatttggaaaaaataaattcatcaagcaattttcttctaggtttgattaatgacatactcgatatgtcaaagatagagagcggcagtctcaactttaatccttcggtatatttttataatgattttttaagtaacataagcgccatgtttactcctttgtgcaacaataaaaatgtgacgtttattattgaaagaggattaactgaaaacacagcgctgttcgttgataaggttcgttttaatcaaatatttttcaacatattaagcaacgctataaaatacaccccaaacggcggagaagttaaatatgaaatgaaaaatatcttagttaataataaaaatttatctgctgattatataatttccgataacggtattgggatgagtgaagaattccaaaaagaaatgtttaatccgtttgccagggaacatgatgatactaacaccacagaaggaaccggtctcggtttagccattacaaaaaatattcttgatctcatgggcgggaatattaatgtaagcagtaaagaaggaaagggtacaacagtaattattcatcttgaaattccattggctgcaaaagagcagattgttactaataaaatagctgataatttaataggtgatttaaatggaaaaaaggtgcttttggtggaagaccatcccttaaacaccgaaatagcagaaaaaattttggaaaataagggagtcacagtagtaagcgccaagaacggccttgacggtttaaataagtttagatcatcagaccaatatgaatttgacgcaattcttatggacataagaatgccggtaatggacggacttgagactacaaaaaaaataagaaaacttaaccgccctgacgctaaaaatatacctataatcgccatgtccgcaaacgcttatcaggaggatatcgaaaaatctttatcagcaggtataaacgagcatcttgcaaaacctattaatccggaacttctgtatgcaactttagaaaaatttattggaaagaataaataaaaattatgcacagcttaagtatatctaagctgtgcattttttatattttatttagttttttatatgtttatcaggttaatatttcaagcttcaaaaattacataataataaagttttaattatttttatatatagcgtaagaagtatttacaattgaattaaattgctgtagaagagcagacaatttacaataaatcagacaaaaatgttaaggttatatatcaaaaaataaatattaaaactatataaaaatgtggttttgcaggcattggaggcgtaaccgcacttgtaatgcggaatcacaccgacccaatttcactataaacacctttaatttttctgtacaatttattgtagtttaccaagaggtgagttttacagaacttcctttgtttcacatactgtgattacaaaaactttaaacataattcattatctcaaatattattcagtccaaaaaattatatttatgaaaagaattttaatatgatatatcaagacatttaaccagagcttactttttatttactatactcatatattaccattatatttatccgcttataagctgcactgtcagacttacaggcagaaaaatacttcaatttaatgttatttatctgatattctctaacgtatttaatcatatttataaaatcaaacttttgttgacaaaaaacaagcgtattactgccgccagcaatacgcttattatgattgaatttattttttaatgaaataattacttattatttactgctgcatgagctgctgcaagtcttgctattggaacacggaacggtgaacatgatacatagttcagaccaactctatgacagaaatcaatagtagaaggatcaccgccatgttctccgcatatacctaatttaatctcaggacgagcttctctgcccgcctcagccgccatgcgaaccagcttaccaacacctatttggtcgagcttagcaaacggatcggattcaaatatcttcttttcataatagtcattaaggaatgcacctgcgtcatcacgcgagaatccgaaagtcatctgcgtcaagtcattggttccaaacgagaagaactcagcttcttttgcaatttctccagctgtcaaagctgcacggggaacttctatcatggttccaacctcaaaatcaaagtccatattattttcttcaagaaccttctttgcagtttcaacaacaaaactctttacatatttaagttccttaacttctccaaccaacggtatcataatttcaggaacaacgtttaatccgtctttgttgcaggctacagcggcttccattatggcacgtgcctgcatctcagcgatttcaggatatgttacagccaaacggcatcctctgtgacccagcattgggttgaattctttaaggccttcaacagttgccttaaggtcagcaaattcaagtcccatttcctttgccaaatcctttatttcttcatctgtatgcggaacaaactcatgaagcggcgggtcaagcagacgaaccgtcacaggtctgtcacccattactctgtacagctcttcaaaatctccgcgctgcataggtaaaagtttatcaagagctgcctttctttgctcaacagtctttgacactatcatttcacgtatagcggcaattctgtcttcagcaaagaacatatgttcagtacggcaaaggcctataccctgagctccgaactcaaccgcatgtttagcgtcacgcggagtgtcagcgtttgtataaactttaagagttctgatttcatcagcccaacccataaacgtttcaaaatcacctgccagctttgcttcctctgtagggatttgtccaagataaacgttacccgttgagccgtcaagagaaatatagtctccttctgaaactttcgtatcattcacatagaaacagctgttatcataatcaactttaacatcaccgcagccggctacacagcatgtacccattccgcgggcaacaacagcagcgtgacttgtcatgccgcctcttgaggtcaaaataccttcagcagcgtccataccctcaatatcctcaggcgacgtttccaaacgtacaagaacaaccttttcgcctctttggaccgcttcaacacaatcttcagcagtaaaataaaccttaccgcaagcagcacctggtgacgctgcaagaccttttacaaacacatcagcttttttaagttcatcttgaacaaatgttggatgaagcagagaatcaagctgctttggctcaacctttagaatagcttcctctttggtaagcataccctcgttaaccaaatcaacagctatttttattgcagaagccgcagttcttttaccattacgggtttgaagcatatagagctttccttcttcaattgtatactccatatcctgcatgtctctgtaatgattctccaattttgttgcaatctctgtaaactctttatatacctcaggcatatcgttttcaagctgagcaattgggttaggtgttcttacacctgcaacaacgtcctctccctgagcgtttatgagatactctccatacagttttttctctccggtggatggattacgcgtaaacgcaacacctgtaccggaagtctcgcccatgttaccgaataccatagcctgaacattaacagcagtaccccatgaataaggaatatcattcattcttctgtaaacattagctctcgggttatcccatgaacggaacacagcttttatagactctatcatctgaacttttgggtcctgagggaagtcttcacctttttccgacttatagaacgccttgaacttctcaaccatttccttgaggtcttcagttgaaaactcggtatcaaatgtgatacctctctcctctttcatctcatcaataatttcttcaaaacgtttctttgagagttccataacaacatctgagaacatctgtataaaacggcggtaactgtcataagcgaatctctcattgtttgtcttcttagcaagaccctgaacagctatatcgtttaatcctaaatttaatattgtatccatcataccgggcattgacgcgcgcgcaccgcttctaacagataccaggaatggattttctaaatctccaaacttttttccgacgattttttctgtctcggccaaagccgcatatatttgatctaaaatctcatcagatattttctgtccatcctcgtagtattttgtacacgcctctgttgaaactgtgaatccctgcggaaccggaaatcccattcttgtcatttccgccaagttagcacctttgcctccgagaatgtttctcattgacgcgtcgccttcgctgaaaaggtatacatattttttagacatttgtattttctccttaaatttaagttttttctaacgttatattttcactaattaaattttattatcaaactatcattttatcagctttaaaacatatatattatttcctcagcttatcaaaaaactttaccaaagctgatttgcattcttcttccattataccgcaataacattcaggcaatttcaaacccggaacaaaattcgacgccatataaccgttttcgatatcataggcaccaaaaaacacgcgtcttattcttgactgaacgacagcaccggaacacataatgcaaggctccagcgtaacatacatatcgcagtcgtcaagccgccagttattaagataacggcaagcactgttaatagctgaaatctccgcatgacacaaagcgttcatgtacttttccctggtgttgtgggcttttgctatcaccacaccattttttacaatcacagcccctaccggaatatcgcccgaggcttccgccaaagcagcctcattgagggcaagacgcatatattcgttttccaaactaacctccgcggcatatttatacgccaatattaaaaatgacagacacaccacaacccgataaaaccgcataccccggaggctaatgaatacatcagccccaaaatacggtatcggaaaacctattacaaattaaaattaaacagtaaacggctttatttcatcaataaatgaatcacaatcatcagtcataacctcaacatcaatcggcttagacaaatcaagactgaatatacccattattgacttagcgtcaacaacgtatctgcctgagattaagtcaacatcaaaatcatactttgaaacaatgtttacaaaactttttacatcgttgattgaagctaatgatacagtaacctttttcatttctctctacctccaataaaattgttttaacttaatttatttttatccattaaattatataattttatcttgcattagtcaatcaaaaatactataattattgtataattttctttaaagatttttatgcaacatttccagtattttcaaacaatgtggctaaaaatctgtaagactttcatttttcgagaggaagtgacaaaaattacagtaaaattcattacactaggctgtaaaacaaacatatacgagagcgaatcaatggctgagctgttcagagaatcaggatatgaaataataaccgatgacaacgctcctgctgacgtctgtgttataaatacctgtacagttacaggcatgggcgccagaaaatcaagacagcagatacgcagagcaaaacgccaaaacccgaacgccttaatagctgtgacagggtgtttttcacaaacatcacccgaagaggtcagagaacttggcgctgatataataatcggcaacaaaggacgctcaaaaatcgttgaattagttaaggctgcagaacaaggcaaaaaggcagatattgtagataatattctaaccgaacatgaatatgaagaacttccggtcactcatactcaaagcagagtccgcgccaatatcaagatagaggatggctgcaataacttctgtacttactgcattattccatatgctagggggccggtgcgttcccgtaatatagaaaaaattgtcagcgaagctgagaccctggctgaaaatgggtataaagaagtggtattgaccggtatacatatcggctcatacggcaaagatttaaacaatggacttaaacttatagatgtgatagaatctgttaataatgtaaaaggcatagaaagaatacgtctaggttctattgagcctgtaattattacacaggattttgtcagccgtgcaaagaacctaacaaaactctgccctcagtttcatctgtcccttcaaagcggttcaaatgcaactctcaaacgtatgaacaggcattatacatcagaagaattcaaaaaagctgttgaacttttgagagaaaatattcctgacacatcaataaccactgatttaatggtaggattttcgggagaaacgcaagatgagtttcttgaatcttatgagttctgcaaatccattgggtttatgcagatgcacatttttaagtattctatcagagagggcactgccgctgaaaaactgcctgacagaatacgcggcgagataaaagaggatcgcagccggcaaatgattgaactggcagagaatatgaaagaaaaattttacagaaaatatgagggaaagattgtttccatactggcagagcaggaaaaagaagccggtatatatcatggaactaccccgaatcacatggacgtgttatttaattgtccttcccacaacatagctggagagacgataaaagtaaaactcacagaatataaaaacgggtttatgcatggagaattactataaagaaaggatgcgtactgaagccacggcctcaagtacctggtaaaaactatgaaagacggatttataaaagttgccgcagccacaccgcgaataaaagtcggagatacaaactttaatgctaaacaaattattgaaaatgtcaaagaagccgcaagtcacggagcaaaactgataactttcccggaactatgcgttaccgcatacacatgcggcgacttatttatgcaggacgctttgattaaaaatgctctaaaatctgtttttgaaattgctgacgcaacagtaaatctagatatactgattgccgtaggacttcccctagcaatagaaagcaaactttataatgccgcggctataataaaagacggtgatattctcggttttgttaccaaaagtcatcttcctaattactcagagttttatgaagcacggcactttaatactttagatagcaatacgacagtcagaattggatgcaaggattattttgcgggtcctaaattgatattctgtgcggagtatccctcagattttaaagtaggagttgaaatctgtgaagatttgtgggtaacaaatccgccttcaggttacctttctgaaaacggggcttctataattttaaacctctcagccagcgacgaggttatctcaaaagctgaatacaggagaaaactggttacttctcaatccgccagagcgctttgcggctatgtatacgcggacgccggagacggagaatcgacaactgatttggtcttttccggacataatttaattgccgaaaacggttcgttgcttactgaatctacactgtttaataatggaatcatatactcagatatagacataaaccgaataatgctggaaaggcgaaaaatgaccacctatactgagaaattcgacaatgagtatcaaaaaatttacttttctacagcagtaaacgacgctgaacttgagcggcgttttgaccctcacccgtttgttcccaaaaatactgcggacctaaatgaacgctgtgaacttattttcacaatgcaggctgaaggtctcagaaaaagacttcagcatatcggctgcaacactgttacaataggaatttcgggggggcttgacagcaccttagcgcttttggttgccgccaaagcttttgaaatgctcagaatatcacttcgcggaataaaagccgtaactatgccatgctttggaactacagacaggacttacaacaacgccaaaaggttgattgaatatatcggcgctgaacttgtggagattccaataaacgaacctgtcactcagcacttaaaagacataggcgcagacatcaataaccataatacaacatatgaaaatgcacaggctcgtgagagaacacaggttttgatggattattccaacgaaaccggcggtatagtcgtcggcacaggagacctcagcgagcttgcattagggtgggcaacttataacggagaccacatgtcaatgtatggagttaacgcctctatacctaaaacattggttaaatatcttgttaagcatgttgctgatataagcgaccataaacttaaattcactttgtatgatatattagaaactccggtaagccctgagcttcttccgtctgaggacggcaatatatcacagcagacagaaagtttggtaggcccctatgaactgcacgactttttcctattctactttctgcgctttggttttaccaaatccaaaatatacagaatggctaaagccgcctttgacggaacatattcagataatataataaaaaaatggcttgatgtgttctataagcgtttttatcaaaaccaatttaaacgctcatgtctgcctgacggccccaaagttggaaccgtatctctgtctcccagaggtgactggagaatgccaagcgacagtgaaataatattttaaaccggagaataaaaatgaatataaaaaatacaagtaataagattatctcattaattaccgccttattgctgctattttcattatcaatacccatattgtcatatgcggaaacaagtaatatttccgtctatattgacaacaaacgcgtctcctttcaggcaaacccgtatatggaaaacgacagggtaatggttcctatgcgtaaaatttttgaggaactcggagcggctgtcacatgggacgatgacacgcaaagcgtaagtgcggtaaaaggtcaaaccacggctatattggcaatcggcttaaatataatgtatataaacggtgaaccaacaactcttgataatcctcctgttctcatatatgatacaacatatgtgccgctccgggcagtttcagaatcattgggctgtattgtggaatgggaaaacgataaaaatagagtaaacattacttcagcgcctttagataattcggcaacggtattttatcaaacctatacaacagtccctgattttggagcttgtgttggtatcagtccagtctcggttttggaaaacggaaccatatacaattattcaaaaaccgggctggagacaggagctcaggaaaaataccggttagttatgacatcaaacggatttactgtcttagaaaaagagaactactatatatataccaaagacagcctaactgttctagccggttacatgggagatatattcagaatagttatacttcccctctaaatacttttatgaatatttagttaactattagattgctttattgacaagcccacaatatatggtataattagcatagtattttttgtcgaataatgaactcgaatttttatttgatacttgaatatatttgaataagatattttctgaccataaaatataaaactcaaacattacgaggggaatctcaatgacaagaagatttaaagttgttgctattataattactataataactttgtccgtatccacttactgcggagttttggcgtcacaaaaactttcgggcttgtcgctcggaacaattagaaactattcatctttggacgcgcttgacggaaatgtgggtatggtaaacgttctgcttataggcgtagacgacggcggttacaggagcgatactataatgcttgcctcccttgacggatactcaaaccgagtgagcatattatcaatcccccgtgacacaatggttacaataaacggcactacgcaaaaaataaacgctactatgggtatagttccgaccacgcctactgcaagcccttcacccaaaccggaaaagagcagcgagcctactccggaacctacccctaagctttcacaggctgagcttgacgctcttccttcaaaactcagcacaacagaaggtcacgaagacctactgataaacaaagtaaaaagtataacaggtctgcctgttcactattttgtaacagttgactttgacggatttatggatgttatcgaagccgttgacggagttgaattcaacgttccttatgacatggattatgacgacccggtgcaggggctccatattcatcttgaagcaggacagcagcatcttacaggacagctagctcacgattttgtccgtttccgccacaataatgacggttccgctcccggtgagtatgtaatgggtgacgagggcagaatgtattggcagcagcagttcttaaaagaacttataaagcaaaaacttaacgcacagtatttatcgaaaattgatgatgtttatgcagtcttccaaaacaacgtcagaaccaatctgactatgacagaaattatgagaaaccttaacgctctgatgaacatcaatcttgacgacatcacttcataccagctgcccggggactatgaatacacaaacaatctttggtactatgtacacagcgaaagaaaaaccgaagaattggtaaataatgtgttcagacctcaaagccgtgaggaatgggaatcttatctcgaaaaacaggccgccgagtcttctcctgaaccagacagcagcagttcgccctcatcagacgataagtccgaataacaaatataaatttaatatgggatgttggataggtaaaaatctcaacatcccattgttttatttgcggtaaaagatttattttaatcaaaccggaactaagatgacgttaaatcagtctaaataagaacaatagaaatactaaatattttataaggaggaattaaaatgaaaagcatatctaaactaatctgtctttttttaactatgtcaatatttattactatgtccggctatgcggcacaaaatcacacagcatacataaacgaaaatggtgaggttatagagaccggaatagatattattgttgacggcgcagctctggacttcagcggcgttcacgagcctgtgattatagacggacgaacccttataccaatgcgcaagctgtttgaaacactgaacgctgaagtctcatgggatgaaaacgagcagtcaattacagcgtcatcaaacggcaccacagtaaaattgtttatagataattctgttatgtatgttaacggagtatctactgtcctggacacagcgccgagactgatgaaatacaatgataattttgacacaacaatggttcctgtaagggcagtatcagaaagtttttcatgcgatgtcaactgggatgaagaaaattattcagtcataatcactactatacccacagaaaccactgcaccgcaaaccaagccgccaatcgcaaccggcgcgccaaatatctctgataaaatccaaactcaaaaccgagttgacgtttacggagagaatattgcattcataaaagatgacggaagcgtttgggttatcagtaatggagaaacacctgttaaaatatcaggaattgagaatgctgcagccgtagaattgggcagaaattttggttatgccctgcttcaaaacggaactgtctattcatggggaacatcaaacgactacggacagcttggaagaaatgattccatgcttgataatacgcccggtttaatagacggactgaaagatattataaaaataggctccggcacatatttcggaatagcgctcagcagtgacggaacattatacacttggggcagaaacgataaaggacagcttggaaacggaactacaacggattctacagttcctgtttccgtttcagagacaaaatttaaggatgcagctgccggttcaggccatgtggcggcagtcagcacaaacggtacagtatatacatggggggagaacggcgaagggcagttaggacgcggcagtgaatccagcaaatatttaacctctccgggatatattaaaactatgtacgacatagaatcggtctatgcgggacctaactcgtctgcggcaatacgaaatgacaagagcatatatatgtggggaacgacatatttgggtcagctggggaaagatgaaaaaccaattatattagataacaacgaggaaaatttggcaattactgacagtgatggatattataagtatgacaagccgcgcagaatgcgctattgttattgggacattgacgaaagggattataaaggcggaataataacgactgccgaaacagtatcatgcggagaatatcagacggccgctttatgcggaggcaaattgtatatgtggggagacagtccaaagctcagtccgaagcttgattcacagtttgagcatttctgtgctcaggaatatacaagtctttcaggaattattggaatatacgccggagaccaaaagactatgtacgctttagacaataacggaacgctttggaagctgacttacaatgaaaagcaggaattattcaatttaaactagatacaggagaaaaagatgggcaaatctgcacttagaggattattaggcagtatatcggctgtgatatttttatatgcactgctaatatccacttattttaactataactcaagcaagcttttatttgtctcggaatttatatttccgttaggctgttcagtcatagccgcgctgtttatagacaaagagaggatgtcaaaattctttatctctgcggcggtttacgttatagcttctttggggctggttataggtttagaaaaatatgggttgcttaaatacatatacagaatattctatgggatttcaaccgattcgccatatgatgaacaaaggtttactattttaattatggccggcgccgcagctcttttgggtatatttattgcgtgcgtcataagtatagtgaatactgttcgtattaagaaattaatagatagtttagaagtgaagtgatttttaatgcggcgcaaggctgataaaagacgttatcccaaatcaaggataacgtcttttatattttatattttatatttatactttgtatataaccccatataatatttattattttacttataataggtgtttgaaccatttaattattacaataaaaaaactgtgattttcagcgaacatcggtaggtgtgaccccacctgtgaaagtgggtttgatttaatatacttgttttataacaacctacaatgtcaattgtggctacacttttgtttaaaagtgtatgttatataagccatataaagttatgcaaactataaatgccaataattaacatagttgttatataataaattacttagttgtgacgtattgcgcatttttgcgccgcgttaggtgggctatcatctgaacacgcagtgttcaatatatatataaaatatttatcaaaattaaccttgtatatgaccccatataaaaaaatttattattacataatagggtgtttgaaccatttctttttctcgtaagaaaaagaaacgcttcaccaaagaaaaagtactgctcgcttaggtcgcctaacggctccaaggggcgctcgccccagctcatttcaccatgaagccatgcttcatgatgaaaaaagccctgtttatttcccgttgactttgtaaactaccgtgaataaagatatttcgtgttcctatttatttcatttgataaaaatggttattttgggcaaacatcggtagggcgcatttatgcgccgtgtgaggtgcgcagttgcggaattgtatatataataaaataagacttccaatattatatgaaagtcttatagatcattacaatttattcagtcataccaataactaaacctaatgtttttattttcttcattggagataattttctaaaatattcaatgagttcgagttcctcaggtgataaacttaaattagtcacttcttttgcagtataacgtatatctgttctgtcaagcagatagtctgctgaaacatttaaaatatcacacaactttataaaggtttcaatggaaggtgctgcctctccgtcttcatagaggcttatagacttctgtgttacgcctaattttgtacttaaattttcttgtgttaaatttttttcttcccttattttgcgtaaattatcaataacttgttatctttaccaattcaaggaaagtgtggtcgaactcgcaaaaaaagtcctttaaccttcccgttgactttgtgtactaccgtaaaaaaatgtttcaagttctttttaattaagctaacgaaaaaggtatattttatgaacctcggtatgtgtgaaccataatgactcttttatcttaaaaccttcaatgtcaattgtggctacacttttgtttaaaagtgtatgtcatataaactataaacgccaataattaacttaattgtcatataataaattacttagttgtaatgtatgttagcaagcgcgttagataagctatcatctgaacacgtagtgttcaatatatttgtaaatattatattaaatattatcatttgaatatggatttattttatttgtgcgatttaatatgtaatcggttgatgtattatagaagtctgcaagttttactagaaagtttaacagtattgtttgaaaccctctctcatatcgtgaatacaccgtttgttgttttcctaatatttctgctatttctgtttgttttaatcctgcttttatacgcagagtttttaatctttttaaatacattttaccacttcctctatttgtcatctgagttttcatctttttcatccttattaaaataggaagaaggcaaattaagatttagcaaatctccaggtttgacttctaaaatgtccgctatattaaaaaatacttctagagaaaatgaagcggttatattaggggcttcaatagaacttaaatgtgaacggctaatatgtgctttctctgcaagttcatattgggtatatcccttagcctttctcaaagctgaaatcatcaaccccaattcaacgaatcggtctctgttttcaaaacctgcttctttacgcattttatatcctcctaaaataataaattaatatagtttgtatattgaacactgcgtgttcagatgtttgctcacctaacgcggcgcataaatgcgccctaccgatgttcactgagaaccctgctttttgtgttaaagaaatttaaaccttcgcttttttgataattaaatcaattaaaactcgaaatatctattttcacggtagttcacaaagtcaacgggaagttacaaggcttttttcatcatgaagccatgcttcatggtgaaatgagcgtagtgcgagcgccccttggagccgcaggcgacctaagcgagcagtactttttctttggtgaagcgtttctttttcttacgagaaaaagaaatggttcaaacaccttattatgtaataataaaattttttatatggggtcatatacatagtaaataatctattttatttaaattctaaaattagacatagtcatattacttcactttaaaattgacagattttgtctgtattgtatattcaaattattattgcaccttttaaatctcacatatttataaatttaactttattaccaatcataatataatctgcatgaaagttatttaaatatattatacatctatttttttgttatttcagaagttataattctatttacagaagtgtagattctaatttaattaatacataaatcaataaaattacataatattatttaatttacgatatataacacttttgtatcaaaagaaaaataaaaagttttgggattatagtaccaaaacttttaaaattaaagaagttttagtattatattactaaaacttcttgacctaatgcaattttggtgttaaaatggttataatatataagggaggtgttttaaatgattccaagagacgaatatctcaactttcttcttagatttaaaaatcagcagcttattaaagtaatatcaggaatacgcagatgcggaaaatccacattgctggaattgttccgggaatatctgctgaataacggcgttgataaagaacaaattatctttattaactttgaagatttggaatacgaggaactccaggactatcataaactatataattatgtaaaaagtaaaatgattcctgataaaatgaactatgtcttcttagatgaaattcagcatgttaaaaattttgaaaaagccgttgacagcttgttcatcaaaaaaaacgccgatatttatatcaccggctcaaacgcctattttatgtccggcgaacttgcaaccctgctctcgggaagatatgttgaactcaaaatgctgcctctctcgttctccgaattctgtaccggtacacccgattctatatctgtttcagaaaaatatagattgtatattgaaaacagctcatttccatatgttttaagatacgaaaacgattatagagacgtcagggaatatctgctcagcctctataacacaattctaataaaggatatcgtcgagcgatataagatttccgacattatgcttttggaaagcgtggtcagatttgtctttgataatataggcaatcaattgtcagtttctaaaatcgctaatactattaaatcggacggcagaaatataagcaccaaaactgttgataagtatttgcaggcacttgttgacagcatgatgatttatcaagccaacagatataatattaaaggaaagcaatatttaaaaactcttgaaaaatattatgttgttgatattggtctcagatacgcgctgcttggaaaacgcggctatgatgtcggacatatcctggaaaacgttatatatctggaacttatcagacgcggttatgatgtatatatcggtcaggttggagaacttgaggtcgattttgttgctatgaatgataatgggtctgaatattttcaggtctccgccagcgttcgggatgaaaaaacgcttgagcgtgaactgaaatcactgcaaaaaataaacgataattaccctaagtatatcctaacccttgacgacgatccggtctgtgactatgacggtattaaaaaaataaacgctcttgattggctgctgaaaaaatataattagtattgtaaattattttaaatactagtatctaacttttgaaaagaaacgattttataaccatttcaatttaatttttataatatacaaaataggactttaaaaattagtatgtgccgcctattgttaaaattcggtctaactttttggcgttggtttaattttaatcaagtcctatttttgttgtttgttttataaaaaaaataattgccatattttcacttaacaaaacactccgtttatctgaggttaaaaacaatttattattgctttattcggctgaatgtggtacaattactaccagcttatattttgtgtctcagccaaaaatctgagacattacgttgaggagattattccggtatgagaaagattttaagccgtacgcggcgggctgtggacgactatcatatgattgccgaaggtgataaaatagccgtcggcgtatcaggaggcaaggacagcctgacgcttctctgcgctcttgctgaactgcggcggttttatcccaataagtttgatattttggcgctgtccattgatatgggctttgacggcaccgacttttcaaaggtgcaggaactctgtgaaaaaatcggcgtggaatacataatagaaaaaaccgatattgccgaagtggtatttgatataagaaaagaatccaatccctgttctctctgcgccaaaatgcggcgcggcggagttaatgatttggcagtgaaaaatggctgcaataaagttgcgctcgggcaccataacgaggacgttctcgaaacattttttctgtctctgttttacgaggggcgtttgggctgcttttctcctgtcacctatctttcaagaaaagacatacatgttatccgtcctcttatctatgtgtctgagggcgatataaagggatacgccaaccgcgcggagcttcctgtggtttataatccctgccccatggacggaaaatcgaaacgtcaggacatgaaagagtttatcaacagcggacagaagaaggataagttttttaagaaaaagatacttaatgcaattcagacaggactgccggcgtggcaaaaactcaataactaataactaaattggaatttggaagaacatataaattttttatttttaaagagattaggagatgttttaacatggcaaatataaaaagagttaaaaaagcagttattccggcagcagggtggggaaccagatttcttccggctacaaaatcaatgccgaaagagatgcttccgattgttgatactccaacaatacaatatattgtagaggaagccgttaactcaggaattgagcagatatgcctgattaccagccacaccaaaaaggcaatcgaagaccattttgacaggactttggagctcgaagccctgcttgaaaaaggcggaaaaaccgagtacctaaatcaaatcaaatcaattgccgatatggttgaagttgtcgcagtgcgccaaaaggaagctaaaggtctagggcacgctgttctatgcgctaaatcgtttgtcggcgacgagccgtttgctgtacttttaggagacgacgttgtctataacgacggcactccatgcttgaaacaacttattgacgtatataacgaaaaaggcggaagcgttttgggcgttcagaccgttccgcatgaaaatatctgcaaatatggctgtgttgacggcgagaaactgggtgacagactttactctgtcaaagacatgatagagaagccgaagcctgaggaagcgccgacggatgtgggcgttctcggaagatatgttatcactcctgagatttttgaaaaacttgagacaacaaagccgggcgcaggcggtgagattcagcttaccgatgcgctgaaggctttaaccaaggaacaggctatgtatgcgtacgattttgtcggtcgcagatacgatgttggcgaccgtttgggatttttggaagcgacggttgaatatgctctacgccgtgaggatttaagcggtcagtttaagtcttatctgaaaggtttggagctgtaaaggtgtccgtcaaaaaatttcattcgtctatatttaaccgagataagattcttaacatatttgaacttgctaaaaatgatttcaggtcaaagtacgccgggagtgttctcggcgtgctttgggcttttatatatccttgtttaacagtcgttctttactggtttgtatttcaggttgcattaaaaagcaagaccgacgacaatgttccatatgtgctttggctagtgtcggctttggtgccatacctgtttttttgcgatggtcttggcggctgtgcctcagctctgactgattattcatatctagtaaaaaaagtacggtttgacgtcagtgttttgccagctgtcaggcttatatcagcattttttatacacgccgtgtttatactgcttctgcttgttacagctttggctttcggatattttccaaagatcgggaatgtatggctgatatattatattctgtctgaatccatattccttttggtactgggatatttgctgtcggctctgacggtgtttttcaaagatataaaaaatattatttctgttttgactcagattggttattggctgacccctttgttttggagctccgacagtttaaccccttggatcagaaatttaatttttattataaaccctgtctcgtatataagcgagggattcagaaacgcagtcctatatggaggaactccggttgtatggtacaccagttacttttggggattagtcattgttctaggctgttctgcaaaatttatattcagtcggtgccgcagcagtttctcggattatatatgatacagatgccgtatgtcatggactgacgtatcttttcgatatgcagaatattaagaagaaaaataaaattttgtaaaaatacttgacaaatataaaatttggtagtaaaatgtagtcaataaaggggagtagcggtctgtgctttcagcataggcgtgcggtgtcgtcaatacgactgtaaatcggtccgtgccgcacttgggctaatgaatatttcgccaacagcaagacttttattacactaatgttgtgtaatagaggtctttttttatttgcacaacataaaattttatatggaggaatgttatatgaggttttttgagatgacatccggcgccgtccttgaaaacttgcggacaagtgaaaagggtctgacgcaggaaaaagccagggagaggcttttgaaaaacggtccgaatgaaattaaagaagaaaagaaaaaaaatgtattagaggtcttcttctcccagtttgaagacttgctggtaattattctgcttgtatgctcagccgtttctatactcaccggcaacggcgacagcgccgctgttattcttcttgttatagtgatgaacagtataataggaacggtggagcactttaaagctgaaaagtccctggctgcgctgaaaaatatgtctgctccccacgcaaaagtaataagggacggaaatgtctgtgaaatccctgcccgagaggtcgtaaaaggggacatacttattttggaagccggcgctgtcgcgtctgccgatggaagagttatagaagccgccggtttgcttgttaacgaaagttctctgaccggagagagcgacagcgtactcaaatcagacaaggttttgaactctgatggtagagaaatagttttgggcgaccgtgtgaacatggtttattcaggttctcttgtcacaggaggacgcggtgttgtggtggtaaccgctaccggtatggaaactgaaataggtaatatagcgaccatgataaacaaggcggagtcaaagaagacgccgctccagaagagcttagaaaacttttccaaaaaactaacaattgcaattgttatcatatgtctggcggttatggcactgtcaattctgcgcggcgaagaaattctcgatgctatgatgtttgccgtagctcttgctgttgccgcaatacctgaggcgttaagttcaatagtaacaatctcgcttgctataggaactcagaaaatggctaagcagaatgccattatcagagacttgaaagcggttgagggactgggatgcgtcagcgttatatgttctgacaaaacgggaactttaactcaaaataaaatgaaggtcagagaaatttacagagatggagtcagccacccggctgagcgttttgacagtaatgacaatcttattctcccgatgcttttgtgtaatgacgcagctttctctgccgacggtgaatctatcggtgatccgacagaaacagctttgatcgagtttttcggtaaggaacgatgcgacaaagtacgttccgcatatccgaggctggcagaaatcccatttgacagtgacaggaagctgatgagcaccctacacaaaataaatggaaagcccactatgctgacaaaaggcgcgattgataattttcttgaccggctgacatcaattgaagtaaacggacgcgtacgcgatataaccaacgaggacaaaaaagaaatagtacatatgaacgtcttctactctgagcgcggaatgcgcgtattatgttttgcaaaacgtgagtttagcaataaaacagatattaatgaaaatgatgaaaataaatacacatttattggattatgtgcaatgaccgacccgcccagagaggaaagcaaagcggctgtagccgattgtatcagcgccggaataaagccggtcatgattaccggagaccataagatgacagctattgcagttgcgcgtgaggttgggatttttaaagacggtgatttggctctggacggggcagaacttgaaatgataagtgacagcgaactttcggaaatgctgcctaaggtcagtgtatatgcaagggtcagcccggcacacaagataagaatagtaacactgtggcaggaattgggacacatagttgcgatgaccggcgacggggtaaacgacgcacctgcattaaagaaggctgacgttggcgtagctatgggaataaccggaacagaggtaagcaaggacgctgcttcaatggttttggcggacgacaattttgctactattgtcaggtcggttgccagcggcagaagcatatacactaatataaaaaacagtatcatgtttcttttaacaggtaaccttgcaggaataatagccgtattgtactgcgtaataatggggctgtccgctccgtttacggccgttcagctattatttataaaccttttaacagattcacttccggcaatagctataagtatggaaaaacctgacagaaacctgcttaatgaaaaacccagaggaataaacgacagcatactagacaaaaagatgattataaacacaagttttatagggattcttatatctatttcaacaatagcggcgtattatatagggctggaacatggagcagaaacagccggaacaatggctttcagcgctctgtgtctgggtaggctcttccactgctttaactgccgcggaagcaagcccataaacgttcttggattcggttcgaacccatttagtatagtggcgtttgccgccggagtatgtttcctcagcgccgtattgttttttacacctatccatgatttgttctctatttcactgctaggaccgtcaatgatagtcgaaataatatttttcgcagtattgccaactgtgataattcaaatatataaaaacataagatactttttaggcaacagataatgattgcaaaatatagagaattatgatataatctctataagctggaagccggacagatatttaaccgctgtccggcttttattctttgatatgaaaaacaaaaatttgcagacagcttatataaaccatttatttgggagagtaaaatgatatcagaaatcataatttggggcaaaacaattcctatgtatggcgttttgggagtaaccggagcgctgctcggcatactgtatatactgctcatggctccgaaattcggagcagacagggaaaacgccgtttatatctatgttcttggcgccgttggggcaatggccggcgcaaaattgctttttattttagttgaaatcccggatatactgcgcgcattagaatcaggaatttcgaatccatctgaaattatttggtcactggcaaacggcggtatggtgttttacggcggattactcggaggaatatcagcggcttggtggtgttccaaaattattaagactaagttaacagactatttggttttattggttcccgctcttgcgctggcacactcgatagcaagaatcggctgtttttcggccggctgctgttatggtattgagacaacatcatggattggctatacatatactaactcgcttgtggctccaaacggtattcctcttctgcctatacagctgatagaagcattttgcatatttttgatttttatttttttagtttggtacacttcatcacctaaacgagaaccttatactttggcaatgtatattatattatatgcgccgataaggtttatcttggaattttttagaggtgacagtctcagaggttttatgctcggtctttctacttctcaatggataagcgcggttctgttcatcataaccgtgatgtggcttataagaaaaaccaatatttgtcactggttttcaaaaaaacatctagattgacattttatagaaaatgtgataatatgtaacatattttgcaaactgtatcaaaagtgagataaattaaaatttaataagggagaggattttaaatggcggacaattacaatcctaacaacggcgctccaaataattatggataccaaaataataactatcaaaacaatggttatcaaaacaacggatataataattatcctcagtatgaacccggaaagggtcaggctattgcaagtatggtactcggtattgtgggtattgtattttggtggtttggctattctgcatttgtctcagtagttttggggattattggtgttattttagcggcaatgtcaaagggagccggatattacggaggtatcagaacagcgggttttgtactttcgttgatttgtgttatagtaggagctattattttctgtgcctgcgttatcgcttgtgctggtataggctgcgccgcggcgttcagctaaatattgttcaatatatttttaagccgcctgtcttaaaggataacacctataagtcaggcgtttttttactctcgatatcgtaaaatcaatttgttttgactgctagtttatcttgactttttatgctgtttatgataatatcttcctataaaacagattggacttctgcatgaataatcagtcgtccaaaattaacagggggttataagttatgaagttaaaaaagctggtagcatttattcttgccggtgtaatggcagcggctctgttgtccgcctgcggaaacagtcctagcggcaatcagcaagacgctgcaaaaacaacgtttacagttgggtttgaccaagattttccgccttacggctatgtaggagatgatggtcagtttacaggatttgatattgaaatggcaacagaatgcgctaagcgcatgggtcttgaaataaaactccagcctgttgactgggattctaaggatttggaactttcatcaggttctatagactgcatttggaacgggttcacaatgaccggacgtgaagatgattacacatggacagagccttatatggataacagccaggtgtttgttgttaagaaggattctggaattacaaaggtagccgatttaaaagataaagttgttactgcgcaagctgattcagcggcgcttaatgctttaaacgatgaggagcatgctgatacaaaagcgcttttctctaagcttttaacctgccagcagtataattccgcttttatggatcttgaagccggagcggtagattctgtggcaatggatatcggagttgccaagtatcaaattcagggcaaggaagaccaatatgttatacttgacgagcctatactcgaagagcagtatggcgttgggttctttaaaggcaatactgaactgcgtgacaaggttcagaatactttaaaagaaatggtaaaagacggcttcttttcagaactttcagataaatactttggatatgatgtatgtatcttgaaagcggattaagtatttttaaaaatttaagataaaaataaagggctttgctctataacaaattcggcaatcaataaattggttgccgaaaatttttgaacggggtatagatatggatttaatgacaatgttaaaggaactttgcggcggaatgctgacgtccgttgaaatattttgtcttactctaatattttcgcttcctcttggactgcttatatctttcggacgcatgtctaagcataaaatcatcagttttattttcaagatttacatatcaatcatgcgcggcactccgcttatgcttcagcttcttgtagtatacttcgggccatactttatatttggaattcaaatcagcaacacttaccgttttgtagcggtaattattggtttcgctttgaactatgccgcatactttgcagaaatttatagaagcggtattgaagccatgccaaagggacagtatgaagctgctgaagttttggggtattcaaaagtacagacgttttttaagataatttttccgcaggtaataaagcgtataattcctcctataaccaatgaagttataacactggtaaaagatacgtctcttgcgttcgcgctggctgtgaccgaaatgtttacagtggcaaaagcgattgcagccaaccaaaagacgatgacagcatttatagcggctgcaattttctattatgtattcaatctgctggtagctttcataatggaaaaggtagagaaaaaactggcgtactacagataggggtgagaatatgaatggtgaaaaggaaaagatatttgagataaaaaacgcaaaaaagtcttttggcaagaccgaggtgttgaaggatatatccgtttctgtggaaaatggggacgttttagcgataattgggccgtcaggctcaggaaaatcaacactgctcaggtgcgcaacattacttgaaaagctggacggcggtgaaatgagataccaggatttgcaagtgacaaaaaatgacgaaaacgggaacgctgtctacgccgataaagcggccttaaaaaaggcccgttcatatttcggattggtgtttcagaactttaatttgtttcctcactactctgtgttaaagaatattatggacgcacctttacatgtacaaaagcgggataaggctgaggtccaagctgaagccgcagaacttttgagaaaaatggggctttcagacaaagacgacgcgtatccgtatcaattatcaggagggcagcagcaaagagtttctatagctcgggctttggctacaaacccgaaagtattgttttttgacgagcccacatctgcacttgacccggagctgaccggagacatattaaaaacgataagaagcctggccgccgaacgaaaaacaatggttattgtaacccatgaaatagagtttgcacgaaacgtggctgacaaagtagttttcatggctgacggtgttattattgaggaaggtccgccggagcaggtaatcggcaatccaaaaaatgagcgtacaagaatgtttttaaataagctaagcagataaaataatttatcttgaatcgaatttgctggttttgacgatattcatacagtcacaaatttcactttttatataagtaatattttttttagtttagtacgaaagcaacaataatgttgtctaaaaattaatgtcctgtataaagaaataatcatgaccatataaaaaacaattcttatatagctagatatttgtaccggcaaatagaattttttattacagaaaatataaatctaatatcctgacttggtgcgatataataaatcttctattatataattggtggaaacagtgaaaatattcaggtttgtttgataaaaagagataaaattgagctgcgataattagggtatagtaacacccattttcaatatactttagcgtagtatatttgatatatcaaaaaaatttatataaagtattttttgatatttttatgttgatattattattttcttatcattacgccaatataataatgttctgaaagtcaggtaaaccggcagcttactaatctagtatattgtccaatacggacttaattcttaaaacgaacatcgaagtttgacgccgcatcgctatctcagacagccgcttacaagcggctgtctttttagattaactttttcctgctatccttaaaccaatctgcttactctttttctaataaccttaaccaatacgtatcttttctctaaattatttctaatatattccgctattatcttccttttctttcctgctatgtctacaaaatatcctctgcacaaaaaagtctgctaccatatttacactttacttttgggagatttatgatctttgctaaagctattttccttccgtaataaaacatgaatattatttctaccgttaaaatccagcaaaaaagccttccggctgtattagcagaagacttctttgcaattttcttttatccatatgccagcggttcacttgagatttcctcaatctcaccatttttgtatacattaactatttttctgagattctcatttttcaattcaatctgaagctgataatactcagttcctcctgaatttgtctgaagctgaagcccgttggtatcatagttaatcgttataccataatggtcttcaacaatcttaacagcctcctgaggagtatatccgcttgaagatgagcctccggaattctcgtggttttctaaacggctttctattgactcgtattgagtgagctgactgtcgctcaatccactcttgtctatagaatccaacatttcacgggcgtctgtatacattcctgaatttaaaaatgactccgcgtcatcaagttcggactgagactgtgaaggcaccgaattgttagagacggaagaactccctgtcttattattagtgcctgaatcagcgcttccaggagacgaacttgaatatggtctctgtgtagtctgaactcttttttctgacgaagcagactttttatctccgctgaacttggacgttgttgtctccccctcggcttcgtgctttgctgaagccgagctctccggcttgctgtcttttggcttgtcatttccgcagccaaacagcacagaacatgataaaacaacagcagcagtcacaagtccggcttttaaaagcttcttattcttcattttatcacaaccttaaaacattaattattttcatcagtcggctccgtggtttcattcggttctgcagcttcgactgattccattgtttctgttgattcagaaatttcaactgtacctgtgttctctaagctgttaacctcttcctcaaactcctgttccttttcaactctggctatcgttgctaccttaacgccttcagccagtctcataagccttacgccctttgttaccctgctgtatgtgcttatgtcttctgaatcaagcctgattataacgccttctgatgtgattattataatatcgtcttccggcgatacaacttttataccggaaacattgcctgtctcaggtgaaattttatatgttgagcagccttttccgcctctgctttgggtcttatattcttcaagttctgtcttctttccgaacccattttctgatacgacaagcattttaccgccatcgcggtatacactcatgccgacaacataatcatcgtcttcaagcttaatagccctaactcctctggaaacacgccccagttctctgacatccttttcattgaacctaatcatctttcctttatgagttccgataaacaaatcagtgtctccgtttgtgagttttactctgagcaattcgtcatcgtcgtccagttttatagctatctttccgcccttcggagcgttttgataatccattatatccgtctttttaataataccgttcttagtgcacatagtcagatactgcccttcagtatactcgcgtatcggaatgagcgctgaaattgtctccccgggcgcaagatccaaaagattgacaatagccgtcccctttgcctggcggcttgcctcaggtattctatatgcctttatcctgaacattcttcctgtattggtaaacagcataatatatgaatgtgtagaagacacaaacatagttgagacaaagtcttcctcctttgtctgcattcccacaattccttttcctccgcggtgctggctcttatatgtgtcaacaggcagtctctttatatatccctgatgtgtcattgttatgacattgtcttcctcggcgattaagtcctcaatatctatatcgtccacaaccggctcgatagatgtgcgcctttcatcggaaaatttatctctgatttcggttatttctttctttataatgtcaagcaccatctgttcgctgcctaatatttctgcaaggtgctcaataagctcagttatttctttcagctcgttctcgaccttttcacgctccatgcctgccaaacgtccgagacgcatatcaagaatagcctgcgcctgtatatcagtgaaactgaatctctcgataaggcgtggttttgcgtcattatagctgtttttaattatatcaataacctcatcaatattatcaagcgctattttgagaccttgaagtatatgagccctggcctctgcctttttcttatcatatttggtcctgcgtactataacctctttttggaagtcaacatactgctccaaaatctgttttagagaaagcacctgaggcgaagttctgtctaccagcgccagcataattatactgaaagtatcctcaagctgagtatacttatacaactgattcaaaacgatagaagcgttcgcgtcgcgttttagctcgataactattctgagaccgtccctatcagactcatcacggaggtcagaaataccctcaattctcttttcgtgaacaagatcggctatcttttcaatcaacctagccttattaaccatatatggaatctcggttacgattatacgttctcttgtttccttccacggttcaatctctgcacgggcgcgtattttaagctttcctctgcccgtagtataagccgcacgaattccgcttgttcccattatctgtgcccctgtaggaaaatcaggtcccggaatatattccataagctcgtctacagtaatatccggattgtcaataagcgcaatgacgccgtctataacctcgcccaaattatgcggcggtatttttgtagccattccgaccgcaataccgtctgagccgttgaccagcaaatgcggtatacgcgacggaagcactaccggttcctgtctgctttcatcaaagttaggcataaagtcaactgtctctttgtcaatatcggtcagcatattgagagaaagcttagacattcttgcctcagtatatctgtatgctgcggcgccgtcgccatcgactgagccgaaatttccgtgtccgtcaacagttgggtaacgcattgaaaaatcctgcgccatacgtaccattgcgtcatataccgacgcatcaccgtgcggatgatatcttcccaaaacatttccgacagtggtcgcacactttctatacgccttgtccggagttattccgtcctcatacattgcataaagtattcttctgtgaaccggctttagtccgtccctcacatccggcagtgcacgtcctacgataacagacatagaatagtcgatatacgactttttcatctcattatcaaggtcaaccggtattatattaagcttggccgggtcgaacataggttcatttgatttgtctcttgacgccatattatgtattctccttttctttacggctgaaaaagacgattgccgtcagagttaaaaatttaatatttaaaacgcaaaccgtctttttcgtacctttataaaattcgacattaggaagtaaatcccttctaaaatcaaaaattttatatctttttcatcacgtatatgatattttataattatacaataaaatatgctataaaaggtttgcttgaaatagatattctcaacatttttcacctgtcaagtccaaaacattaagaatataaaacatacaaggaagcaaaaaatcagttatatatacttttataacattataacaatacagtaaaaaataaaaccaccgcaaaggaataccggtaacagtatattaatcaaaataaaatatttttaccaaaccggtatttcttgtgccgtctataaaaatttgagctgtcaattctaaattttaacttagcttttatatgatatttacttcacttgcagctgcaaaacgattaatatcttggaacaaaaaaactttaagtaaactgatttaaaaaatttctctgaactaaaaatacaataattaaaatataactaatacacatgagttttaattctataaacaacttctattttatagtattaccgccttataaaagcttttaattaatataaaaaactgcctagcctcaaaacctcagaaaaaagcaacgctacataatattataatcagataaatttatattttgccgtcaatgtcttctccttttcattatcattgttgtcagcaaaaatttctctttcaaattctatattttcatgattaagacacaaatccataaaacacagaaaaattccaatatctattctgttataataattcactttatccgccggcattatcccgcgcttaccgggctttttgtatctaaaaacctctatatacccatttgtgttctccgctatccatggctgtgtattacaagcgctcggtgcaaacctaacaacctctgtgacgtttttaattttatcgcctgtccatatttcttcttccgtctttcttttgctcttatacatattttttctgaattttgtttccccgacttttgctatggctatcataattacaaaatccataccgttatacgatttttcttctgtctttcctattccaaaccatagagagcctatatttttagacgcaagatataaatccagctgctctccaatataacctatgttttgcagatagttatccttcttttcgctatataaaagaatacagtattcctgaccgcgtctgcatgttgttgctttagcaggaacaattctgacagctgtttttatgtcttccgcaagcggcaaaaaacttctatatttttcctctatttcacataattctgcggcagaaatggttcctatatccttaaatatatgaaatgattttctcttaaatatcatgttgtagagcatatcctgcataaaataaaacctcgcattctaatttgactaattccacgattttaaattatataaaatataaatcaataaaaaatccggagcataaattataacaagaagataatccctttcgttaaaaaatatgagctgctgttagcagctcatagaacagttattaatgaatggaatacagctgctgaggattccggtatttgtgtcctcgtaagagaaacaaaacaatttccgcgcctctgactcgattcatagtacaatcattatatcaatctaatattattgtcaagactaatttaaattcaaaattaattattaaatatttctaatatttaaaatctttaatataaaaccatattttacaatcaaatacaaactctatttttattttaaagtgctttagtttctggccggttccagcctgctggtccaaagatacgtttttatgtttttatcgctttttaacgttacgtttatatcctgaggaatatcagacttagggattctgacaattttaacgtctgtcattatttttccgctttcatcatatgaacatgccgcaaatacagcaccgctctcatcattttcattcacaatagaggcggtaatatttgcaccgcttatctcaggggatttcgcataatatattcctctggcaggcgcgcttgtaggtaatggtgacgatgtcggatcctcagtaggttcaggcggattttcaagtatgtcaaatgaatacgcctctatattaaggtatccggtatattttccgtcatactggttttcattcgctatcttcaacgagtccgccggattgtttttatttagctcgtggctatcctcccaatcgtcaggaataccgtcgccgtcactgtcgagctttccggttccataatattcaggcttctctaaaagtataaacttgtcatagtttaaaattccattttctccgaccgttgatattctttttaccgtgtcatttaccgcccgttcatcgacgctatctctcgggaaattatgtccggcgctttgaacaacactgccgaaagcttctatagcactctctgttgttatgggataatctttgatatactgagtatgcgacttttcagacggttctgcagtctcatcgtatttctctaaattataagtttctgtataattatcaaactctacgccaaaaacattatcactgttaatcaatgcaaccttttcagatggttttattgcgtcataatagtttccgtctattgctaaatctgttgcagcgccgactatcggataactgctctgattttcaggctgagtccccatcattttatagaacctctttaagtctttgctggcaggccccattttataataattgtttaccagattaaccctaaccatgttctgaccgccatgcgacgagttgctctgccaattataaaaaacattattccttatatccagcagactcatatagtcaggctcatagttgtaagaatgaacagttgcggatgtcccgaccagcggataacggcttatagacgacgctacaaggttatgatgatacgacatattcttgccgccccatatgccgccgtagccatgagcctggagctgcccttcctcataatggattcctatatttataggctcagttattatacaccactgaatagtgctgtccttaaccgcatacaccgaacagcactcgtcgctggaccagctcatactgcaatgatccacaatcaggtttgaagtattgtaagtgcctccgaaagaatcggcgtcgtacttatgattttcataatcatatactcccattctgaatctcatatatcttattataatattatcagcgcttaccgttgttggagctcctgaaacacatataccgtcaccgggtgaggtttgacccaatatagttatattaggggctttcaatgtcagaccttttgtcagatttatcgtaccggccacatcgaaaacaattatcctgttgccgatggacacagcgtcacgcagtgaacccggcccgctgtcgttcagattttcaacatggtaaatttcaggaatcggaacggcacgagctcctgttgtatacatacctccgccttcggctcccgggaaggccggcagccctcccggcaatatatcaacagcatacaccgcattgctcataacaagcaagctcagcaacaaaaacataacaacagcctttttcatagtaaagcccccaaactattctttttataacatggccaaagccaaatattttttactgttttctatttttaatcttcaatatataaaactgtcttaaaacctatctctttttcaattctatttatatttgttatattaatttaattagtatttttctatagcagtacatacagctgtctcaccttaatataaaaacatatatctaattcatctttaataaacggcatacttttatatcttttataataatttcactaaccattttgataaattaatatttcaattctattgatactcgtttcatagtagtctctgatttgttttttcctatccctatatatgatttgcatttcacgctatttcagaaacacatatagttccgccgtcctgtaaagacaaactttttttatttgtgcaaactgtttcgtgcatggtctatgttatatagtaataaaaatttataaaatcctactttttcagaatagttaacttcaacatcatgattattgaaattttctctgcctggccacataacacacacaattccattatcgctggatctggatacctctgttaatcctgcggaaccatttcgctggaccataaaaatgtttttatatttccgccctttttcaaatctattgatactcgtttcgatatatctgattttggtattatctcaactgcagcatcagttaaaacatcccctgcatcattataagagcatactataaacataaccccattatcatcagttttattaactatttcagctgtcacgttcaatccgtttattaccggaacttcttgataatagattccgctcggcgaactgcttggatttggtgactccgatgatgccggcggatttgtcggctctgtttccggtgtagcagtcggaacaaatgacggaacaacagtaggggctactgtgggagacgaacccggatcatcagttggtgaacttgtgggctctgccgttggcggtgcaatcggctcacttgttggacctgcagtggcactgggctcaggtaccggcgtacttgtagggcttgaggccggagatgacgtcggttctgctgttggtgcattcgtcggctccgctgtcggaggagatgtcggcaccggttcagcattaaatacaacatctaaacctatattttcactgggcataacaaacgtattgttatatactacagaattgccatttgacgtacgcatagtaatctgcgcgttctgccctgcaatacccggcactgcgtcaactaaaaccacagacttctcaccgatactatacttatttgaattatccgcagaatagctaactccatatatcggtggttttgaaccgtttaaaaagaaataatatgtgcttccggcttccaaatcaatattcaaaaccatatctttctggcctccgcttgaggtatacgccttatagttaaccccggtcagcgcgtctgtcatatacgcacccggaacaccgttttcagttactctgacaaaattcatcggttttgcagtgttccagcttatcgccagctggagccgtcccgtctcacttggtgaaaacttcaaaaaagctcctccattcggcggattgtcatacgttccgtttttgcttcctgaaccactgtaatacattgcattttgtgaacctgtgagcgttgctgtatatgttacgccgtcgatttcaacaggttctacctgtgcggtggtaaacacattttttgtgccgcccttatcgtctgcttctccgaacacaacactgagaccatcaccagcctgaacagtcttaccgttttcatatgaagcagcagtatctattttatatatctcccttgctttcggaaactcaacgccagctgcatccgtaagcttaacagacccctcgccggacacgtttatttccgcgtcgtatgagggagaagttggggttggcgtttgtgttggagccgccgtaggagccgccgtaggtttagccgtcggcttaggcgttggagttggctttgtcggatcaagagtcggtgccggagtcatcgtaggagacggctcatccccggctatatcgaatgaatatacttctatattataataccctgtatactccggatttgaagaaaaatacattgaatctgccggattgttcttatcaagtccgtggctgtcctcccagtcgtccggtattccatcgccatcgctgtcagctttcggtgttcccttatactcatatctatccatagtctttaattctgaccagtcaataattccatttgtcccaaccgtagaagttctttctgacgcatttgctacagcacggttatcaacatcgtcacgcactatatttgccccggctccagccaaaaccttatcataggcctcttgtgctgtatcggtcgttatcggataatcatttatatactgagtgtgcgagaactctgcctccgggtcatcagaaccatcatactccactatattataagtcttagcttttgaatgcgcaactcccaaagtattgtcagcattaatttcatcaactgtggtgctgctcttctttgggtcatagaaatttcccgcaatagccaaatcagtaccggctccaactataggatgcttgctgttgcttttgctttcagtagcatacatttcataaaatcttttaatactgctgctcgcgggtccttccttataataattgttaacaagatttaccctaaccatattttcgccgccgtaagatgtattagaacgccaattataaaagatattatttcttatgtcaaccaaactgtttgaatccggctcgctcttatacgattttactgtagcggaggttccgacacgcggaaatctgctgttagcgcttgatactaggttatgatgatatgtagagttaacccctccccatattccgccatatccatgctgctggagttttcccccctcgtagtgtatagatgtatttagaggttctgttattatacaccattgtatggtggaattcttaatcgcatatacagaaacgcattcgtcagtagaccagctcatactgctgtgatctacaatcaaatctgaggtctgggatattccgccgaaagcgtcgtcgtcatactttttatttgcctcgtcatatactcccattctgaaacgcatataacggataattatattgtccgcatttatagttgtaggggcgcctgacacacatataccgtctccgggcgcagtctgtcctaaaacagttatgttaggctgactgaaacgaagataattcgtcaaatttattgttcccgcaacatcaaaaaccactattctacccggctccgatattgcgtctctcaaagagccgctgccgctgtcgtttagattggttacatgataaatctcgggagtgctgtcccctctcgctcctgtagtatacattccgccgccttctgctccagggaatgccactaattttgctgattctaaaactgcacttttttcaggctccgcatatccggttccaaaacaaccgaaaaggggtatcatgacaagagccatagctaaaaacaatgatgtaaactttttcatactaacctccaaaaagtaaaatttaattatgtggattttaaaaagcagtaccaaaaaagactacaacacaataaacgccacactcttggcacccattgagttgtagtctcgcaaatctataaaaaagactgcagtctccgggtgctgaccgcaccgtgatgacgaaaaccgcaacagatataatctgtatgctactccctaaaaccatatctattttatcacagttttacgacaaaatcaatctttgttatactgaaagattgccacaaaatcatagtatgttatgtaaaaaaaactgtacataattatacaattgaataaatcgccgtgattacgggcaattctctaaattactaacattctcagcacaaaaaatttacaataattacatattcttttctcacttaaaactcaaaatgttaaaaataaaacggcgtttaatccggcatatgcagaattaaacgccataattttattgtttacctaaataagtaaagtgcatatagtcatatgtaccgctgacccatgcgtttcctccccacaaccagccgtattttgcaaaagtctgcacaacaacgcctgttggtgaaaatgaaaatactgaagtcgacgggtcataaaatgttcctatctgctgtccgtttttgtaaacacaataattttcattatagttaaggtctataaccgtaccaaaattatgttctgatacgcttcctcctgaaagagcatttctccatgaataccctaccgcatcctttattggaggcttctccggcgaattatatatctcgctgaatatagcctgaacatcttcagctagtaccgaattcaccttaaatgaacgccatccggtttgaagctggtctccgtctccaaattcccatacaggaaccacgacttcaaccatatgtgcctcggcttcttcgtgagttgaatacctagcgccgacagaaccaaatatccttatttctttgtcagttgcttcacctgtggctaaagtttctgaatatgttttaagctgatacagtccgtcgctgtccggaacctgcagcggtgttccgcttggcgcatatccgcctgttccgtccggaaccggttcaggatcttcctcaactatgggttcccctccgacaacttctccgccgggtgtaataagctgcttatcaggagcgttacgtaaggcaataactgttccattactctgcattactgttttttccaatgtatataccaaacgtccgtttgagtcagttcctgatttaagagcagactgaatacggccgtcaacatccctgccgtattttacaaagcagcggtatgcaattattgccgcttcctcacgtgacacataatcttttggtttaaacattccatcgtatcctgccatcagatcattatccagcataaacgccacataatctttagcccagtcatctatatcccatgcgtcctgaatatcatcaaaaacgcctgttgaagggaaatatggacctaaaacaccggcagccgacagcatacttgttattaccttacacatttcctgacgggttataaaatccttaggaaaaaagtgtccctcaccgtcgccgctgattattccaacataataagccatattagcaaacacattatcggtatccacaaaaggcgtatatgcgtttgatgtaacattttctgctgtaatggtacaataaatatttacagcaacatttataaagtcaagcctgtttatagcgtctgtatacggcttgtctccatactcagtggaaataagactgtattccatcgcccctttaaccgtgtcaactgcccaccaattcggctcatacgcaaagactgctatgctggataatgacatacataatgtcaaaagtaccgcagtaatcctctttttcacaaaattcacctctgataaaatttctgctccgccaatctaagtcaacacaaaacttcaaattaaatatatatatcagcgaaagcattatatttgtgtgcgtaaactgagagtaaattataacacaaaattcgacttttctcaagttttgacttcaatttttaatagaatgttcacaaactatgaatatatttacaaagcgttaaacaacctttttcaccttcctaatagtggaagtatctcttataaatatactttttacactaaaaagcaggtatagataaaacagcagattaaatattaattatttgcttcctttttatattcctcgattatgtatcttggtctagccttggattctttataaatttttcctatatactctcctattattccaatagacacaagctgaacaccgcccaaaaaccaaattgaacacatgagagacgcccagccgtctgaggtatagccaaaaaatttgctgacaagagtatatatcgcagcgataacagctgcaacacacacaatcaaccccatagaccacagaactttaataggcttaacgctgaacgaagttataccgtcaaaggcaaaagacagcatcttttttaacggatatttgctttcaccggcaaaacgttccgctctttcataatacacactatcgcttttataaccgataagaggaaccaatcctcttaaaaacagatttacttctttaaaactttccaggtcattaagcgcccgccggctcatcagacggtaatctgcatgattgtatacaacgtctacacccatcatagccataaatttataaaagccctgggcagtagtgcgcttaaaaaacgaatcggtctttctttcacttctaacgccgtataccacatcgcatccattgtcaaacttcttcaccatctcaggaataacattaatatcgtcctgcaggtcggcgtctatcgaaaccgcacagtcgcactcgtcctttacagtcatcaaacctcccaaaagagcgttttgatgtccggcattatgcgccagctttacacccctgtaaatattgttttgctcgcatagtccgctgattatttcccatgtcctgtcccggcttccgtcatctacaaaaactatcttactctcaggactgactgttccttcgctaatcattttcccatataattccagcaagcgctttgaggtttcccccagcacttcctcctcgttgtagcacggcagaactacaaataattttgtatccttcatatcgtcctcctattaaaactttaaaaataaaagggcaggcgtaagcctaccctaaatccaatttacaaattaattgtcagactgtaacgggcagtcatagttaaaattactgaccttcaccctgctgtgctgcgtcttgctgtgccgcaccatcagcggctccgtcctgagcagcaccctgatctgctgcatcgccttcagctgcaccttgctcagctgcgccatctgctccttcagccgcaccggcttcagcttcctgctgcgcctgagctgcctgcatatcttcagcagtcatgattatattaccgtttgcatcaaccagatttccattttcatcagtagaaacattcatagttccttcgtctgacgcactgtctgaaactgcattctgagaagcatactcctgtattgaaacataagtaagcacaacagatgaaactataaataatatagctacaacagccgtgaacttcttgagcatcgcatcaacagttcttcctttgttctttccaaaaaatgtttcagcgccgccggcaatagcaccagacagaccctgctgttttccgtgctgcatcaaaacaatcactgtaagcaccacggcgataatcacgtggataataactaaagctgtttgcatttttaaacttcctcctcatacgttcaataacgtatattagtaaaatatagtattttgcttagtttcaaagcaccagtgcactagattatatcacagcacctggtaaaaatcaagtctttttttaaaaatttctattttttccgcacaaaaccaaacagccgccggcaaacaagacagcggctgttcctgtttaatatttatttcgcgtactctattgctctgagttcgcggattacattcacttttatctgacccggatattccattgtttcttctattctctttactatatccttagccatcaaaatcgtatcgtcgtcactaaccttatcggccttaaccatgatacgaacttcacgccctgcctgtatagcaaaagagcgttcaacaccttcaaatgaatttgatatttcctcaagctgttcaagtctcttgatataattttccaaattctcgcgtcttgcgccgggacgagccgcagaaatactgtcagcagcctgtacaaggcatgcctctattgagtttggctcaatatctccgtgatgtgccaaaatacaatgaacaaccttatcattctctttatacttcttagctatatcggcacctatagttacatgcgaaccctcaacctcatggtctatcgccttgccaatatcatgcagaagtcctgcacgttttgccagtgtaacatccgcacccagctccgccgccatcaaacctgctatatgcgatacttcgattgaatgctggagaacattctgaccgtaactggttctatatttcagtctgcctataagctttacaagctcaggattaagtccgtgaacattggtctcaaataccgctctttcgccctcctgcttgataacatttttaacctctttttgagacttctcaaccatttcctcaattctgcccggatgaattcttccgtcagttatcagcttttcaagcgaacgtcttgcaatctcacgtcttacagggtcaaatccagaaagtataaccgcctccggcgtatcgtcaattatcaaatctattcctgtaagcgtttctatcgttctaatgtttctgccttcacggccgattattcttcccttcatttcatcattgggaagtggaacgactgaaactgtggtctcggtaacatggtcagcggcacagcgctgaatagctccggtaataatcttcttcgccttttcttcagcttcctcttttgcctgctcttcaacacttttaataagcagtgcagactcatgcttaacatcatcttcaacttcttttaaaagcaaatcttttgcctgagacgcagtcatagtagcaattttctcaagctgagctatctgcagctttttaacacgttctatttcagcctgcagttcttctgcctcgttaaaccttctttgaacctgttcttccttcttttcaatcatttgatttttcttatcaattgtatcttctttttgctgtacacgtctttcctgtctttgaagttcgtttcttctctctttgatttctctttcaagttcacttcttgacttatgtatctcttctttggcttcaagtaatttttccttttttatgttttctgcatccttctcggccgcagccgctgcatcgtttaaaatacgctccgcttcttcttcggcgctgcctattttaagctcagcaaagttctttctatatgcataaccgtatctaaacgacataaacgcgctaataacgcctattatgataacggcaattaaaatcaatatccatatcaaagtatttatcttaaagcacccccttctataattttgattgtaaaacaattcattcttgacttttcaattaactatccagcaaaatcacaataatagcgcactcgcagcgcaaatttctcgggctgtttcagatcaactttcgtaactgttataataaacacatcattcaattgttccgcttagtctgccgggatagttttgaaataaaaatcagcaattaaagaagatgatacatgtgacactgcataaaatctgtgtacgcataaaactcacgtattacattatacacaaatttcgtcaaaaagtcaagactaataaactttcgtttatccaatatatatattacatttttataacaaagaaaaaacgggataggcctaagcctaaatcccgtttgcgcttcgtccggcaaagtgtgcgtaacgccggagcgaagtctaatgttacatttaaaaaggtacgtttctttaaactatgtcttctagttcggcaacaacagaagtctcatcaacagatttctccgaacactcctcttcgggagtgtagataacaagttcaaccgactttgtcagcacatcagtatagctgtaagaaacccgctgctccgatgtaaaaaattcactctggttatctaattttacagtaaagatactggggtatgtgctctcgatgacaccctcgcgtgtaacaatttgttttctgcctttcttagccgtaagccggaccttatgcccaacattgtcagtaagatcggactttatcttggataaatcattctgaccgtacaattatcaaacccctcttcacaaatattttttatattataacatattattacaaatttgtaaagagaaattacaaaattctaacataaaagttacacgacaaatttttcatgttgctgcaaacgcattaaaccgccgttattatcaatatatatcatgacacaattttatataatcacggaaatttgttcccaaaatgtaattagttattaagaaatcatccaccggagttgtgttaagtatctttgttatactttggtcaaaagttctcgcgtcaaccactattatcttgctgtaggcacatgtcagccacggtataagcgcgtttgaataagaatctttcagcataacaagagttttcttattcgggctgttagagtctatctctatatacggctggtcgccgcccaaaaacatgttatatgaagccccgcggctcaaatcaaacatttttcctgtgtagtcaaattcctgatcaggtatataactaaaggtagtacacttaaaagtaatatcatttaaagcatttttataatattctatagtatccttatgactgtctaaatacggagcctgcgcctgactgtaaagatatccggtgaagtctttgacctcacctttctggaattcgtccagtctcagcgtgccaaagcccatatcagcgcccattttgcagtaagcatagtacgctcccaagcttgtccaatgatggtctgttctgaaatagacatattcacctgcatcaaaatgttcttttaaggtatcataaacattgatattttttactcttttattaaagttactatataaataatctatattttccttttcgtcatcacccactgttttgtaaaacggcataaaatcaatttgagtagggataatcatagaatacagatttatactcgccggcagcttctcagcatagaaatccaacatttttatatattcttcctgagcctgttcatcggcacggtaaacttccataacacggtcgtcagtcacaagcagttcacttttcttagttgagcctgtccctaaatcgccgttcgtttccactagcttgccgtactcatttatccccttgctgtttttatacgcagcagatacactcataaacgtgctgcggtagccaacattatctgaaaggtatgtctcaaaatcagaagtaaactttcctgatttaagcctttcaaaagaaaatgaaggaaaatcagccagttttctgttttcctgctgtgctgacgcctcgtctctgggcagaattacaacagcagtaaacccggcaattaaaaatacaataaataatatcaaagtaatgactcttcttgcagtcttcaccttacctgcccccttaactccgccgccgcggatattcagctcatgcttaattaaaatctaaagtataagaacggattatatgtttcgccgactaaaagtataaaacagaacgccagcaatgctacaacaagcacaggagttacaatcacatttacagcgctgcatttcttcgcaaaccacctgtatccatatcttaaaaccggagttgaaataacggcgcaggcaataaggagccatagattcgacataagagtcgtaaagccggcaaagtcatacagttttcctgtgcctccaaatgcgcataagaaccaatcctttaaagctccgaagtcggtatagtagaacagtgcccatcccaaaacaaacacaatgattgtatataaatgagcaaaaaatgacgggagcctcatcaaagcgcctctaaacattttcttttcaatcaccaataatattccgtaataagcgccccaaagcaggaagttccagctggcgccgtgccaaagaccggtaagcgtccaaacaagcaagatattaaatatctgatgacgccggtttccgccaagcggtatataaacatagtctctaaaaaatgtactgagtgatatatgccatctccgccaaaagtctgtaacatttttggctatgtagggataattaaagttctccaggaagttaaaaccaaacattcttcccatacctattgccatatccgaataacctgaaaagtcgaaatatatttggaaagtataagcaattataccaacccatgcggacagaacagatgatgacgccatattgccgtcgagcagcgcggttgctattgcaccgacgccattagcaaatactacctttttaaccattccctgcacaaaccttaatattccatactcaaatcctttaagagtgacatgtctgtcattgatttggtgttcaatatcgatatatctgacaataggaccagcaacaagctgggggaacatcgaaacataacaaaggaaacttaacggatttttctgaacctctatttcgcctctatacatatctatagtataagacagggtttggaaagtgtagaaagaaataccgagcggcaaagcgaagttatagtatggaatactaagtccgaaaccggtatttatactgctgataatccagctcgaatatttaaaagtagcaagaatacccaagttaagcacaagggacatgataagcgccagcttagcctgccattttccaaaatatttatgtattataagaccattgacataatctatagccgcgctgaacagcaaggcaataacccatacaggttcaccccaggcataaaaaatcaatgaggcaataaccataacagtatttctgtaggtaatattactgttccaaaagtatagcaaaagcactattggcagaaatatacacaaaaaaagcaagctagaaaataccatacctatcctgttctcccctctgtcaactaactgttaaaaattaaattatccgcaaaataatccattataatttataattacaaataattaggttagattataacaccaataactttaaatgtcaattaaatttctttcatcagccgctgaaacaatcggcgcgaaatccgaaatttatctaaacaaaattaacaacttatctaaaaaatatacttatactttttaacagtatatctgaaaaatatagaatgaagaggattttttatactttttacaaattaaaacaagtttgacgataatattacaataatattaaaaatataattttaaatgaaaattttttaaataataagattttggtttgtgaaaagcttaaataaaacatacggatacgttaatgtcatatataataaaaatatataaaaatacgatataccaaggccttgataaatgtgtagggctcaatgactttttacattaaaaccttaatatctgtgacttccgccgcagctgtaaggtatatgttattcagactcgtcccaatttaaaatctacaacggcattagtctgacttaatctgatatatgttattgtatatctcattaggtgaactgccggagtacatggagcgttaacatatttaaaacagttcaacataattctttttatattgaactatttcgcagctgcacgccttacatacctgatttcatcccactcaaatgtttgctataccatattaaaaaaattcattattttagaagttttttatttacagtgttgttgataaacatcaacaggcttgttttgatatacctggatgcgtgtaatacgaaccatattttgataacctgaaacgtctgtgcccaacctgcaagacaggtgtgatataaagtggcttgtttaatctaacctacaatgtctgtgaccccgcctgttgggcgggtgtgatacaaattagcttattttgattatcctacaaagtcaattgcggctacacttttgtttaaaagtgtatgtaatacaaactatattgtattacatacactataaataccaataattaacttaattgtaatatataaatcacttagttgtgatgtatgacagcaaacaagttagatgttagctcatctaacacacagcattcaatatataaaagatacttattaaatatatacatcaataatatagaaatcctaattataaaagactgcgccttttacaaccaaaaagactaattgaatcaatatgcatccacaaatgtttagattttatggtgcatgtcaattcaattagtctttttatatttaacatcaaatcaatgcttatctaactaaaaattaatcttcttataccggtacctcacattaagcacaagtcccacagccaacaaattcgtcacgagcgatgaaccgccgtaactgaaaaacggaagtgttattccggttacagggaacaaccctatacacatccctatattttcaaatgactgaaacgccagcatagccgccactcccgtgcaaatataaagtccttcgctgttccttgcattgagccctatatataaacacctgataattatcgctgataacagcactattacagccacaccgcctatcatacccaattcttcacaaattacagaatatataaagtccgtgtgccgctccggcaaaagattattatagcggctggaaccgttgtataaccccatgcccgtaagcttgccgctgcctgcggcaatttttgactgaataacatgatagccgctgcctgtcgggtcattctccggattaaacaaggtgattatcctatccttttgatattgtttaagcagaaatatccaaatcagcggacaggccgccaacagagccccaaaagctccggctaaatacttccagctgatttttgccataaacagcatagccagcgccatcatcacaaatactacaaccgttccgaaatccggctgaagcagcatcaaaatacacaacactgccggatgcagagctactttccacatgtttttcggttcattcaaaccgcttccaacctcactcaaatgcttggaaaacgttatcacaaatcctattttgaccagctctgccggctgaaaactgacaggaccgagaacaaaccagcttctcgcaccgttctgcactctgcccagtccgggtatcaacactaaaaccaataatatgatacatgccgcataaatatactttgacaatctcgccaaataatcataatccagtatgcttattatgacaacccctatcaatcctaaaactaacgccgcagactgcactataacgtatctaaccgctccgtcaccaccggcgcttgaaatcataactattccgaaaacagccgtcaaaacagtcagtgcaataagggtaaaatcaatattcttaatcgcgtccctaaactttcttgtcttttcaagcatctattaaactccattccagcgtcataaaaataagcgtaattccaatcagcgtttaatactcagcgccactccgtctcccagcggcagaaccgctgtttcgagcctctcatgttcacaaagcatttttatatattctctgagccttttaactatagtacgctttctatgcaaaaccaaatcatcggttgcagtcattcccttgtacagcacattatctgaaattaacagccccccatgtctcagcatactgaaacatggttcaaaaaacgaattatactgggcttttgccgcgtctataaaaatcatatcgtatttattatttttattctgcgccaattccggcaatatatcatttgcgtcaccctcaaacaactttatcctgtcagaaaatcccgctcttgcaaaattcttttcagcaaataccgctgctttgtgattgagttctatagtatcgaccttcccggctcctgcgcctatcatgcgtatggccgaatagccaatagcactgccgacctcaaggaccttttcacagcgcccaaattttatcaaaacttctatcagttttatggtttcgggctgtgaaattggcacctgattttcagccgcaaattcctccagctcttttaaaaaaccggtgctctccggaataacactcctaatatatctgattatataatcataatttacgctatcgtctatcatatctattccctttttaaaaagtctaaaccataatcaatttttagccttttcggtagggcttggcgtcggcgtactctcgtcaaccggctttccctcctcaagaagcttcattttttcctgatgttcatcataagtctgagagaaataatttttatttccgctcgggtcagcaaggaaatacatataattggtatcggcaggcctaagcgccgccttaatcgacgcaagccccggagaagctattggaccttccggcaaacctttatatttatatgtattatatggagaatctatttctgtatcctcaatactcaacacagtttttctttcatggagcaaatactgcacagtagcacacgattccagttttttgccctcataaagcctattgttaaacacggaggcaaccagctttttctctccgtcattcgccgcttctctctcaatcacagaagccattgtcacaacctgatcaatcgggtctccggaaccgctctgattgtatacaggcagcacatttgacttaaacgcgtccagcatcataataattatatcatgagccgaggtgcccggatatatttgatatgtcgccggatacagatacccctcaaggcgattctccgaacgcggaatctcattcacaaagtcataatcaaattctccgttatttacttcatccataaactcttccttatccaccagtccgttctgagccaatatatcagctatctgcccaagctcataaccctccgggataactatctgaacctgttcgccgacaccgccctcagcgtaatttccaaatgtctccaaaagttcgtcataagtcatagaagaattgacagaatgtcttcctctttgaaaaatgtatttatttccggcatacattttaaacaacgccggatattttataacgccgcggtttccaagcaggctagcaaccttagccgaaccggctcctgcgggtacatcaataacataattctttccatcgccgtctagaccgtttatatcacggtatgccaaattacctgcagcgcctatgacaacagcaactatgactgcagcaatacatagggctattattcttctgaccctttttctctttttttgttttaactgcttcattgcctctcttgccgccctttttgcttcaagctcttcaagagttttatattcatgctccacttgaatcaccctccgtttatatgtattttaaaatcccggctgattcataagccgctgtttaaccgcatattatattactgtccgtgataactgtatcaacttttatatcaaactcgtcacggtatattttatcaagcagacactctttaaaacaaagaccaacagtatcaccggcaaagccgtttaaaaacctgtcgtaataccctttgccgtatcctatcctatatccgtatttatcaaaacccagtcccggaaccacaactaaatctatttcagaactttgaacaggtttcaaaacaccggattcaatcagctcagagtcaggttctaaaattccataactgccggatttcagctgacttagactgtctgctccaaaagctgttatttcacatttcacactgtcacacaacggcacagccagcttcttaccgtctgaaatcactctgtctagaatgtcaaatgtatcaggttcacttccaaaagatatgtaaagcataaccgtttctgcggatatatatttatctgaatttaaaaatttttctgttatatcagagctctttaaatttcgtaaaccctgtggaatttcatctcttatttttcttaaaaattttctctgctcttgcttattcataatctaaacctgcattttctgtaaaatgcgctcaccttttggaggctctgagaaataatccacaatagcggctccaaattccaacgctttccctgcgcctttagctgtgataaaatttccatctctcactactccgtctgataatatgtttgattctgtcagactatcctcaaaccccgggaagcaaactgcatctttgccgtcaagatatccaagatcacctaaaatcattggggcagcgcagattgcggcaaccagcttttcatttttcacacagtactcaattgcatcggtaaccattttatttttttgaagatttagggttcccggcattcctccaggcagaattacacctgaaatatctgaataatccggctcagaacaatctgtttttatggtaatattatgagcgccgcaaacaagttcgccgtcaactccaacgaacttaacctccagccctgctcttctgattacatcaacaggagccaccgcttcggtctcttcaaacccatcagctaagaaaatatacagcatcttatcaacctcttttttatatatttctccctgttccctctatttatttttctttttatccttcctgacagtcataacaaacttgggaagtgtagcaaatctacccaatctgctgggattcttgcaaaatctatacagccattcaagattacactttataaataactcaggcgctctttttgcaacgcccgcaaatacgtctaaagccccgccgactcccatacaaagagaaacattagtaagctttgacttgttttcaaatatccacttttcctgcttaggagctcccagacagactagaagcagcttagcgcctgactcgtttatctgtttaacaatatcatcggtttcattatccgaaaaatatccatgatgaacaccaactatattcaaaccaacatattcatccagaagtttaacagctgcagcctcagcaacgcccggcttagctccgaataaaaaaacgccttcacctgtctttctgatattggacaaaagaccacagaccaaatcaaagccggcaacccgttcaggcacaggagttccaagcattttggccgcataaacaacgcctataccgtcaggggtacacatatcagccgagttcaggacttctctaaatccggcgtcttcataagccgccataactatctcaggattgggagtaaaaatagttgaaaccccatcgcttcttaccatttgctcagccttcttcaaagcataagccgatgtaatcctatcaattttaactcctaatatatcaattgtatctcgcattcaaaagctccttaccgatatttttacatattctaatttattatagcacaaaaacatattttatgcaagatagtaacgcatttgtatatatgttgtaatgatttgcaaaataaatttatctttcaccgagggtctatagattatatttcacaaactatttactatttggcttaataataatattagatttaaatatactttttagacttcactgtattcaggctcagtcttctataaatttttaatcaactaaaaatgtcatataaaattataccttttatatagtgtttatgctatattttattttcattaatcacaatatataatattaagattaatatataagaataattttggttacaaactgtacattaaacaataagtgttcatatgctgctcatctaacgagataaacaatatttcccaggccggctttcaccaaaaacatatatttttatataaaattttataaattataattactaaacacagaaagtcatcaaattaagcttttcacgctccgtatattatacaaatattatatacatatgattatgaaacaatcagaaaaaagagaatcggatgtattattatacagctcagattatttaaataactatttaaaattcttatttatatccatatatatttcttaaaaattataaaaatttttaaattaatgtaatatttctgttttaaaaattttttattaaattatatttaaaaaagtccgacgccatacagcgccggactttttagagaattatattaatctgaaataactatagttgctacaaagtatcctgttgaatctgagcctgttgctgttatattagaccctgcaacaatatcctttgctgtaatactctttccggtggttgatttcaggaatgtagttcctgactcataatataccgtctctgttccgccggatgaattggttactgttataaccttaagcgttgtgtttatgcttacaactttacctgtcactgtcgtctttcccgttgatgaagtcgcgctggactctatcttggaaatatttgaaccgtctgtaacaaccgttgcggcatttcccggacgcaggtcgtatatagttgcgtccactccgttaaccttaacagacgttgaagcagtaaggttatatgtctcactctttccctttacatcaagagtaatctgcggagtttcgctcaggattatttcctttattgtacctgatacgttttcagtctcacttgtagcctttattgaaacaaccttgccgtatgtcagtgataaaacaacgctgtcgttcttagccaaatctctaactcccgcaatattgccgtttctggtaacctcaacaccgtttatagaaacgtcaaatgtctcctgctcattatcactgttcttaattgttattgttgtacggttatcgtctccggcattaacctttacgaaagttccggacacatctgaggttttgctctctactgaacattcagttacctttgaacctgacagtaccaatcttacaaagttgcctgccttaacgtctccgtaagaaccctggcttcctttaatagtatacttacagtttgaagcgaaagtatatgtcgccttattgttctcgtcctcggaatcttttatagttatctgctgtccgccggaattatcacttgtctgaacaactattccgtatacagaaagattttcctcaggcggaaccgtctcaatcattctgacatcgccgaatgtataagtgaccataacttcgctctgtgattctattctgctgaactttgaattttctccattaatctttatacctgtcatatctccgatagtgcaggttgtattctttccgtcagcgtttactaccatttttttattgccagtatctattgagctcacttttccctgaatataatttctgtccatcttctccatcatacggttaagaagagttgccatctgagctctggtaagcgttgtttccggtgagaaaaatgctttgccgttctcgtcttttcccataccgttcataagccctaaatttgtagcataagcaacataaggacgcgcagcttcagggatagaagcataatctgaatattcgttttcatccaaaacagctgactgtgcttggtcatcttttccagccagtttaaccatcaaatacgctgcctgccatctgagaagagatgtgtttgcatttgccgctgacgcatagtcgcgcaagtcagtaatattcaaaacgtcaaaatacattaaaaagctaagctcatcaacatatgtcgtattaatagcgttaacagtagccgagtaaccggcgtctgcccacttcaccgtctgcgaatactcagagtcttcaactcccaggattctggacatcagaaccagggtttccacctttgagactgcacgctgaggtttaaaggtgccgtcctcataaccttttatgtatcccttgtccgtcatctcgtttattgcctgctttgcccatgcaactgtcgcgtcgttttccacgtcagaaaaagtcgccgcaaaaaccgaggtcgaaagtaccgctgccagcattgtgccgcaaagcagcgccgaaataaatcttttaattttcattttaaacctcctatgtatatgatacacattatattgttaattatctactttaaatataccatacgtgccaaaatatttcaaccgccaattatccaaatgtgaaagttttttttaacaattatgtaacaaaaaaccaaatttcaaataaaatgtctttaataccataaagttttcggtgtattttcaattcctgcgctaatactaacattgtaaaaaaatcaaaaataaagatgatttttgtaataggaggactgaaaatgaaaaaaactttcatttcctttattgtggctatgagcatcgcaatctattcaatgtgcggatttgccgtatttgctgatgtagtgcccaatgaaggcggaaccattgaaaactatcctcaaggttccgttactaataataatggaaataacgaaacaacaacaggagaaggtcagcaggatgtcaatctgcgcacatttgacggcacaaacacagatggaacaattgacataactaacggcgtttccacaacattaatcgaaaacggttcgaagtataacggtatggcaaccatgccgataaactcgaatatggcacagtcaagatacagcacggcacgcgttgcgctgtctccggatatatcagatacaaaatatgcagaggcagcagaactcctcggagcattgggaataatggtcggagacgccgagtcaggtgcattcagacctaacgacccaatcctcagaagtgagatggcaaaagtagctgtatactctattggacttgaagacgtagtaaaaagttccaacggaattacaaaatttcctgacgtacctgcagaccactgggcaacaggagcaattaacacagccgaccagcaaggtttagtagttggtgacacagaaggaacttttagacctgacgacaacgtaacatttgaagaagcggtagcaattatagttcgtgctctaggatatgagccggccgctgaggacaagggcggatttccaaccggatatatgtatatcgcgtcatctaaccagctgctgagaggcattgacgctacagctgccgagcctgcaatgagaggcgacatagcacagctggtatttaatgcaatgaccgttaaccttatggagcaggttggatatggttcaagcatatcttatgaagttgtagacaagactttgctttatgacaaattaaatgttgaaaaagcatacggtcagataacagcaaccggtgaaacttcactgtctggcggttcaacaacagctgaagacagaatccaaatcaacgacaaactttatctgatgggtgatacaaacgcaacacaaatgcttggttacaatgtattgtattacgcaagaatagataaaaccacagacgaaaagacacttatattagtaacagaacagccgaacaaaaacaacacattaacacttaactcaacagacatcgtagacgtaacaggcgacacgacagacaagagaacagttgaatactgggcagacagaaatacagacagaagaacaaagacagtatcaatagacccgaatgctatctatatttataacggtaagtataaaacaggactcacaaacgaagaccttaaaccggcaagcggtaacctcgttcttctagacactaacctcaacagcatgtacaatgttgtatttgtaaaccactttactaatctggtagttgacacagtatcagaaataaccggaagagttacagataaatatctcaacggttcactggtatttgacaaagataatgccgacgttaaatacagtatcatcaaggacggagccaagattgacatttcagacctcaaagaatggaatgtaatttcttacaccataagtgatgataagaacttgataaaagcatatgtttcagacgcgtcaataaccggtacagtaaatgaaatttctgaagacggatacagaataggtgacagtgaaacactttatgaaaaagctacaagttatccaaacgaaattaaactccgtgacaggggaacattctatttagatattgaggataagattgctgctgtaaacacaaaagcaacaaacgaatccgctataacaaccaactacgcatacttggttgacgccgctctcaaagacagctttgacaaagtaggtcagtttaaactgttcacaaagaccggtgaaactgttgttatggagagtgcaacaaaactcagatttaacgaagaatacgctcagactcctacaaccgtagtaaatgccttgacagccggaggaaaagcaacaccgcagctcataatctatgaagctaacagcgacggcaagataacagcaatcgaaacagcaaaagatgagacagcaacaggagctccgaacacaagcacattcaccaaaaatattcagaaggacgatatggtttacaaacgtgcttccggtaaattaggaaatgtaggtattaacgaggacacaatcatatttgatattcctgcaagtgctggaacagacacagacaagtattcaatgcgtaacagttccacattgtcaaatgattcttcatacgacgcaataatctatgaccttcaggaaaactatatggctaacgtagtaataatcacaagctcaacaagcatcacaagcgctgagtcaccgataacagttgtaaattatctcgcagagacacagaatgctgactatgagtataccgataagctttatggataccagtcaggagagacagttgaaatcatggcagcagacaagagcgttcttagaaagagtgacggaacagcccttaagtcaggtgatatcatccagtataagacaaacgctaagggtgagattgatggaataactgttctgttcgacagcgacaacaagacagaagaattcctgagaaatgtaacgaccgacctgacaaccgtttacggaagagctattaagaagttcagcggaagcgtaaacgtagctgttggtgacgcaacttacaactactctacaggggacgcaatagtatatctctatgattcatcaaagaagaagaatagtatatctgttgtatcgccggctgatatagagctttacgagaaagacaatgaagcaagactgttcgtaaaactttatcaggacgctgttcaggaaatggttatcgtaaaataatcaaatatttctaaacagtaacaaaagagcacctgacaaatatttgtcaggtgctcttgcctattattatatttatgtttaaatttatatttaaaaatattttattgctttgtatactcagcaatatataaaaaacatacctgtatcgtaaaatagggaaaacatcacaatgttgtaaaatttcatgatggaaaaaattgtgagagcaatctatcatttacagaaaaggggacagctctgccaaaccgtttaagtttatataatattgtattttaagcagcttgctgttgctctatttgtcctttgaatttttatcattttcatccttattaaaataggacgacggcaaattaagatttagcaaatcaccgggttttactcccaaaatgtcggctatattaaagaaaacctcaagagaaaaggaagcggttatattaggggcttcaatagaacttagatgcgaccggctaatatgggctttctctgcaagttcatattgggtatatcccttagcctttctcaaagctgaaatcatcaaccccaattcaacgaatcggtctctgttttcaaaacctgcttctttacgcattttatatcctcctaaaataataaattaatatagtttgtatattgaacactgcgtgttcagatgatagctcacctcacgcggcgcataaatgcgccctaccgatgttcactgaaaaccctgcttttttgtattaatttagactggaaacttagttttttaattagtaaattaatatgaactcgaagtatctttattcacggtagtacacaaagtcaacgggaagttacagggcttttttcatcatgaagcatggcttcatggtgaaatgagcggggggcgagcgccccttggagccgcaggcgacctaagcgagcagtactttttctttggtgaagcgtttctttttcttacgagaaaaagaaatggttcaaacaccttattatgtaataataaaattttttatatggggtcatatacaaagaaaatatatacttaccataaatatataataatacaaaaaataagttttgaaaactctctattcagatagtatctatataaagagtattacaaaattaaattaacattttaaactacattcaaagaactaaaactatatacaattacagtcataaaaaacacctcaaaataattgtaaataaaaaatatatccctaccattttataaattttatatattagataagtatatacaacaagcaagtctttatgaaaacaaaaaaattaattcaccataaacattatcaattatatttatatcaataagatgtcttttccaatatcataatagaattcatttctcgcttaacacaatataaaaaccgattgacaacacaaaataatcacagttttttaaaagttaatcaacttatttttattactaactttactccaagttaacttttatgcaaaatatttatgttttatattacaagaaacgagttgtgtagaatgactggaatgggatatagtcaagtccagcggtattgtgataacaaagttacaagaattgatttaagcgttttagaaagaatttgtacagtattgcccaattgcaatttaaacgatttaataaaattaacaagatagaaattttctcattttaaatcagcaaaatgatatattatatgcggttatatacaaaatcatttttaatgaatattagatattgaacactacgtgttcagatgatagctcacctcacgcggcgcataaatgcgccctaccgatgttcacctaaaacctgcttttttgataagttaaatctataggaaatcggtatattttttcacggtagttcacaaagtcaacgggaaagttacaaggctttttcttttgtgcgtggagcgcaaaagaaattagcgggggcgagcgccccttggagccgcaggcgacctaagcgagcagcactttttctttggtgaagcgtttctttttcttgcgagtgcgaccacacttttcttgaaagtgtgtgttatacatatgattttattttgccataacctacaatgtcattattatgtatactcaaataaaagaaatggttcaaacaccttattatgtaataataaattttttatatggggtcatatataaagaaaatatataaataatacagaaaaatatgtttcaaaaattcactatttaaatagtattataaaagtaaactactcattaaatacattcaaataataaatccatattattcctaaccatttgacaatttaactatattttaatataattttacttaataaataaaataaaaaaccggaggcaataaatgataatagaatcttttaactatcttcctttggaagctaaaaatatcagagaaacagtttttgtaaacgaacaaggttttaattatgaattcgatgatatagatgacattgcaactcatttggtattatatattgatgataaagccgccgcaacatgccgcttttttattgataaggtaaaggatacatacttaattggcagaatagctgtattaaaaaactacagaggtcttggtcttggttcacagctgctgcaaaaagccgaaaatctcattgccaaaaatggcggtaaactaatacgtttatcagcacagctgcaagccgtagaattttaccgtaaaaacggatatatagatgaaggcgaacctcactatgatgaatcatatcctcatgtttggatgtataaaaaattgactgacagtttagataaataaaaaaatccccctgccgcacaggcaaggggaaaataaactaaattaaaccagctcaagtacagaaacctcagcagcgtcgccgcgtctcggtccaacctttataattcttgtataaccaccgtttctttcagcgtacttaggagcgatttcgtcaaacaacttcgaaacgacctctctttttgttatataagaaagtgcctgtctctttgtgtgaagtgtgtttcttttgccgagcgtaatcattttctcagccattcttttaacctctttcgctcttgttgtggtagtctcaattctaccattctctaaaaacgaagtagtgaggtttctgagcatagcacgtctctggtctgtgggtctacccagctttctttgttgtgccacttaaatcacctcttcctataattcttaatacaaattagtcgtcatttgcgagaccaagttccatagcctccagcttcgcaataacttcctccagcgacttgcggcctaagtttctaaccttcatcatgtcgctctcgctgcgggttgtcaaatcctgaacggtattgatacctgcgcgtttcagacagttataagaacgtaccgacaaatcaagttcttcaattgttgtctcaagtactttttctttctgtccttcttctttttctatcataatctcaacgtttttagcgtcgtcagataaatcgataaacagactgagatgctcactgattatcttagctgcaaggctcacagcttcagccggcgtaatagtgccgtttgtccacacctcaagcgtcagcttgtcataatcggtaacattacccacacgggtactgtcggtataataattcactttttcaacaggtgtgaaaatcgaatccgttgcaataacaccgatttggccttgaataagctccttgttctgatctgatgagacgtaaccgcggcctttatcaattgtgatttccataaacagttttccatcttcatcgagagttgcaatatgcatatccccatttaggatttccacatcagcgtcatgctttatgtcacgggcacaaatttctcccgcgccttcctgattgatgtaaacagtcttaggaccatcagagtgaagctttataacaagattttttatgttcaaaataatttctgtaacatcctctttaacgcccggaacggtagaaaactcatgaagcacaccgtcaattttaacagacgttgaagcgactccgggaagagatgacaaaagcattcttctcagtgaattacccaaagttgttccatatcctctttctaaaggctctataacaaactttgcgtatctgtcgtcttcggatgtttcaacacattctatacgtggcttttcaatttcaatcattgttaaacctcctataaattaggatagtagcgaaaccctactatttgctgtaatactcgactatcaaatgctcctcaacagggaagtcgatatcctctctgtcagcaagtgcaatgattttgccttccaatgtgtccttattcatatctatccacttaggtaccagtctgtttgagtttctttcaacgatgtctttcattctgtcagcatttctgctgctctctctaagactgataacttcgcccggctttacaagataagaagggatgtctactctcttaccgttaacggtaacatgtccgtgattaacaatttgtcttgcttcacgtcttgtgttagccaatcccatacggtatattacattatcaagtcttgactccaaaatctgaagcagacattcacctgtaacaccgttcatctttgtggccataacataatattttgcgaactgtttttccagaacgccatatataaatctgactttttgcttttcattaagctgcataccatattcgctctgctttttgcgtctctggttaaaagttctgttagaactcttgtctatacccataacggacggctcaataccgagggtacggcatcttttaagcacaggctgcatatttttagccattcttttatcctccttacaaatctattaacattcttagtttagactacacacgtcttctcttcggcggtctgcaaccgttatgcggaataggtgtaacgtccttaatcatattaacctcaagaccagctacctgaagagctctgattgctgcttcacgtccggctcccgggccttttacgtaaacttcaactgtcttcaaaccatgttccattgcagctcttgcagcggtttcagcagccatttgtgctgcgaaaggtgtgctctttttagaacctctaaatcccaatccgcctgcgcttgcccaagaaattgcattcccggcaacgtctgtaatagtaacaatggtattattgaatgtagatttgatatgtgcagcgccgcgctcgatatgctttttctccttacggcgtcttgactttctagctacttttgccattgtatctttcacctcctataagattacggaatcttgcaatatataaaaatattgaagaaaattcaaaatcataaaactattaaaataaaaatctaaacattaactgtattaaagcttttagcaattaactagttaattatttcttcttatttgcaatagttctcttaggacccttgcgggttctggcgtttgtcttgctgcgttgtccgcggacaggcaaaccttttctgtgacggattcctctgtagcagttgatttccatcaaacgcttgatatcaagtgcgatatcacgtctcagatcaccttcaacgttgtagttgtcgatttcatttctgagcttctgaatctcatcttctgtcaaatcacgaactcttgtgtccggattaactcctgttgctgccaaaatcttttttgaagtagaaagaccaattccaaaaatgtaagttaagccaatctcaactctcttctcgtttggtaaatccacacctgcgatacgtgccataattaattcacctccataaaaatttcaaatgaaaaaggagcagaatttcacccatattttctatggcatcggcaaaaatttagtggtcttaatgcctaaccctgctcacattatgttaaagcttaaccctgcttctgtttatgacgcgggttttcgcatataaccataactttaccttttctcttaattattttgcacttttcacaaataggtttaactgaaggtctgactttcatttccttcacctcctaaatttgtattatatccgaaaatatgtatttccatactaacgaaccgtattattttaccacaattactgcttaaagtcaatctttattaaaaatattcatctatttatctttaacaaagtttaaatatctgttactcaaattttaagtcaagattaccatcgccgactttctttgatctttcggaaatcttctgttcaactctattactctcctcaccctctaaaggtgtcggctgataattattacttgtcctgcttgaagatatggaacagggaattattgagtagttatcatcttttgctgccataccttctctaaaagtaaaggtctgtcggaaaatcattgtatctgtgtcgcttggatttggatttccgccaaagcaaaagtttcctaaactgtaacatatgtattttcctttatatttctcaattccctgcagaacatgagggtgatgacctattaccaaatcggcgcccatatctatagcgcggtgcgcaagtgtaacttgctcctctgacggtgtatccgccttttcttcgccccaatgaacctgaacaattttcaaatcatcattctcaatcttagacatagccgacggtaatacctcactggcagacccgtctaactgataaagcccaatgattccaacttttactccccgaatgttaaaatgagccgtttcggtatttaaagcatattttatatccgaatcataaagcgtctttttagtatcttttaaactttccggtccatagtcctcactatgattgtttgccaaagtgacagcctcaacactgccctttttgagaatgtttacataatcgggttttcctctgaacgcatattccttatcctgtctctccccattattggacaatgtaccttcaaaattgacaatggtaatatcgtcgtcttcaaaaatatgtctaacgtttttaaaaaaataagaataatcattcttgttatttttaagtacatcctcaaatgtattgtcagaaaaactctcatctgacgccaaagtacaatctccggcacagctaattgtaactgtgcttacaacattagcaactgactgcgcttcattatcagaatttccgcatgatgacagtgaaaatgcagaaatgaccatacatataagaatcagacagatttttttcataaaacaggcctccccaactacttataagccctatacaaataggacttattttgctctccatgtaattctgccctttgataaatcataaggtgaaatttcaactgtaaccttatcacccggcagtatttttataaagtgcattcttagttttcctgaaatatgagctaaaattttgtgtccattctcgagttctaccttaaacattgcgtttggcagcgcctccaaaaccttgccttcaacttccaaaacatcttcttttgacatactcgctacacctcctttaaaatttttctgatttcagcatccgcagttcctccgggagcattcaaaaaacctaagtcatcaacatttcccagtttaactaagtgcttattcttttttaattttgcattattaatttttctagtctttccgtcagaaatatggacgtatccgttttctaaagactttactaccaaatatattcttccgcttccgcggccggcggtagatttgactatatccccgactgtaagcttcgattcaataagatctgtcattggttcacctaaatattatgctaatttttgacttttattcaacttccggaaaaccatccggcaaagttaaaagaacagggtcgcctgctgtaattaaaatagtattttcataatgagctgtgttttttccgtctctagtgattactgcccattcattatcagcaacatacacgtcttcgcttccgccgcatatcatgggctcaacagctataaccattcccggtctaagccttatccccctgcttttggtaacataattcggcacttcagggtcttcgtggagatcagcgccaacaccatgaccgcagtatccacgcagcacagaaaatccgtttgcctcaacgtacgtctgtacagctttggaaatatcagatatcctgtatccatcacgcgcaaattttaatgcttcaaaaaagctctgtcttgtaacctgaatcaggcgctctgtttctgaatccacttttccaaccttaaatgtcctgcaagcgtctccatgatatccctcaaaacatgctcctacgtcaatactgactatatctccatcttttaatggaacattatcaggaaatccatgaattatagtatcattaacactggcgcaaactgtgccgggaaatccgccgtaacccttaaaagaaccggtacatccacgagaacggatataatcctcggcaatcttatcgagttccattgtggtaacgccgggttttactgccttagatacttcctttaaagtttcatatgttatcctgccggcttctttcatcttttctatttctgacttagattttataataaccacttttattcccccagagcctttatgacttcagctgtcgtgtcctcaatcttctctttgcctgcagctattctcagcaaacctttttctttataataatttataaggggctctgtctgagtatgataagtctcaagacgtgcctttacagtttccggcttgtcgtcgtcacgtactgtcagatgacctccgcatttatcgcatatgcctgcctctgcaggaggtctaaactccttatgataagtagtagcacagctttcacactccaaacgtcctgaaagcctgcttattattgtttcatcagctacgttaagcatcagaactttatcaatttctatagttgatttttcaagagcttcagcctgagctaaagttctagggaatccatctaaaataaatccgtttttacagtcctcattactcaatctgtcggacataacctgaatcataacatcatcgggtataagctttccatcatttatatactgtgctgctactttccccagctcagtttcttcttttatgttttttctgagaatcgctcctgtagaaatagtgggtataccataatgctcacttaatttctccgcttgcgtaccttttcccgcacctggtgcagccagtaaaatcaatctcataaaacatacctcctattcatttttgacaaaacttgaaatattaaatcaaattttatcctaaaaaacggatagagcaggcatttaacctcacaaaacagtgaggtaacacctactcatgccgtaaataatcgcttaaattgttaaaactcagattattccaagaaacccttgtagtgtctcattaacatttgtgactccatatccttaacggtttcaagagcaactcctacaacgataagcagtgatgtaccacctattgcgaaattatttataccaagtcccaaattaatgaaaataggcaggatggcgattaatcctaagaaaatagcgccaaccaatgtaattctcgaaagtgtctttgaaatgtattctgatgtaggacggccgggtcttatacccggtataaatccgccgttcttcttcatattattagacatttcaattgggttgaactgtattgctgtataaaaatatgtgaagaagataatcagcaagaaatacagtattgcataaacccaagaagttgaagagaatatctttaagaatcctccccagaatccgcctgtctgtgatgtcacaccgaaaaatccggcgattgtgctcgggaatgacataattgacatagcgaaaataataggaataacgcctgctgacgcaacctttatcgggatatgcgtactctgaccgccgtacatttttctccctacaacacgctttgcatattgcaccgggattcgtctttcggcctcattcatcattacaacaagaccaactactacgactatcataataagcagagcaactactccaatcaagccgattccgccgccttttgcatatgcgtaaagcgactgtgccatagatggcagacgtgaaacgatacctgcaaaaatgataagtgaaataccattacctacacccttttcggttatctgctcaccaagccacatcaggaacgctgtgccggctgtgaatgtaaatataacaacaacagcggtaagaagtcccggattagttactgcattatagctcttcagcatgaaataaagaccgattgcctgaataaatgccaaaactactgtgccgtatcttgtaatctgtgctatcttctttcttccgtcttcaccctgcttctgaagtctttcaagagcaggaatagcaacggttaaaagctgcataataatcgatgaattgatgtatggtgtgatactcatagcgaatatggtcgcgttctggaacgcaccaccggaaataacgtcaatgaatccaaaaagtgaattatcagatgtaaatatttccttcattgccgccggatccaaaagaggaaccgggatacatgaaccaagacggaagattattatcattaaaatcgtgtataaaatcttttttctgaggtcgataatcttccatgcattacgtatggtatctatcatgattaaatcacctcagcctttccgcctgctgcactaatcttttcttcagcgctcttgctgaatctcttagccttaatagttactttcttgtttaagtctccacgacccaaaacaactatgccatcattaatctttttgataacgccgttctctttaagaacttccgctgtaatctcagtaccgttatcaaacttgttgagatcttcaacattgattgatgtgtacttctttgcaaaaatatttgtaaagccacgttttggaagtcttctgtagataggcatctgtccgccttcaaagccgggacgaacaccgccgccgctacgagctttttgacctttttgacctttgccggatgtcttaccgtttccgcttccgtgacctctgccgactctgaacgccttcttctttgagccctcgcttggagataattcgtgaagtttcattgagtccacctcctccttttttatcgaaaattgtctagttaaaatcttttgaaattattcagctacagtaacaagatgcttaaccttgaaaatcattcctctgatttgaggattgtcaggctgctcaactgtctggtgcagctttcttagacccagcgccttgactgtggctacctggtccggcttagcaccgatggtgctttttgttaaagttactttaattgtattagccaaggatctttcctcctgtctcaatcgcctttattagcccagtatttcttcaggctttttacctctgagccttgcaacttcttctaagctcttcagtgaagccaatccctcgattgttgctgaaacaacgttcttcgggttattactgcgcaaacattttgttcttatatcttttatacctgcaagctcaagcactgcacgagcaggtccgcctgcgataactccggtaccttctgcagccggtttaagcagtactcttccggctccgaattcaccgataatttcgtgtggaatagtagtttctaccattggaactgtaatcatattctttttagcgtcgtcgatacccttacggatagcgtccgggatttcagcagccttacccataccgcagccaacatggccgttatggtcgcccactactaccagtgcgctgaatctgaagtttctaccaccctttacaacctttgcaacacggtttaagaaaacaactttttcttccaactcaagaacttctgcgtctatacgctcctgcttctttgttctttcgcccttttctgccatttatcgtttcacctctttcttgttatctaaactagaatttcaggccgccttcacgtgcgcctgcggcgagttctgcaactctgccgtgatatacatatccgcctctgtcaaatacaacgttctctataccggcagccaaagctttctttgctacagcctgacctacagcttttgctgcatctttattgccgccatagtttgcctttaaatccgcatcaagcgaagatgctgatactaaagttgttccagttgtatcatcaataatttgagcatagatatttttaagacttctgaacacgcaaagtctcggacgctcagcagtgcccgatatcttcttgcggactctagcatgtcttgcgagtcttgatacattgctgttttgcttcttaatcattaaatttgcacctccaagcgtctaattacttcttagaaccggtcttaccttccttacgtatgatatactcatcaacgtatttaattcccttgcccttatatggctcaggcggtctcttctctcttacctctgctgcaaactgtccaaccttctgtttgtcagctcctgagataataatttggtttggctgcggaacgtcaatagaaattccgtccttttcttccatctcaacctggtgagaataacccaaattcatgacaagcttattaccttgctttgctgctctgtaaccaacaccgttgatttgcagctccttcttgaatccctcgtttgtaccgacaatcatattgttcagcagagtacgagtaagaccgtgaagtgacttatgctttttaatttctgacggacgctttacgttaatcgtatctccgttttgttctaaaataatatcttcggggagtgactgtttgagttctcccttaggaccctttacggtaacttcattgtttgcaccgattgtaacagtaacgcctgccggcactgtaatcggcatatttcctatacgtgacaatgaattctcctcctttctaccaaataaatgccagtacttcgccgccaacattctgcttgcgggcttctttatctgtcataactcccttggatgttgaaattatagctatacccaagccttttagaactctgggcagctcatcctttgaagcataagatctaagaccgggctttgaaaccctcttaagacctgtcaataccttttgcttgttctctgcgtacttaagtgtaacgcggataactccctgtatgccgtcgtcaataacctcggcactcttaacatatccttcacgaaccaaaatgtcagctattgccttcttcatttttgaagcgggaatatcaacggattcgtgtcttgcattgttagcatttctgattctagtgagcatatctgctataggatctgtaatatgcatttagacttacctcctttttatcggaatcagagattggtttggttttccgtctctatatcaaagaccaccttatctccttctatgtttgtattctgttaacttttatatcggcttaccacgaagctttcttaacgcctggaatctggcctttataagcaagctcacggaagcaaattctgcaaataccgaacttgcgaagataagcatgcggtctgccgcaaatcttgcatctgttgtattcgcgtgtagaatacttctgctttttttgttgcttaataaccattgactttctagccataagcttttatcctccttattcggtactattttgtgaacggcgcacccataagggtgagaagctcttttgcttcctcgtcagtttccgctgttgtaacaaatgttatatccattcctctgagtttgtctatcttatcatactcaatctcagggaagataagctgctctttgatacctaaattatagtttcctctgccgtcgaatgaattcgggttaattcccctaaagtcacgtacacgaggcaaagctgcattgaacaatctgtcaacaaactcatacatctttgagcttctcaatgtaaccttacatccgagattcattccttctcttactttaaatgttgcgacagactttcttgcttttgtgataatcggcttttgaccggtaatcagcgccaaatcggcagctgcgctgtcacaagccttagagttttctctagcgtcgcttacgcccatgtttacaacaactttaacgagctttggtatctgcattacgctcttgtaattaaacttggacatcatagcgtctttaatctctttagtatatttctcttcaagtctcatttagactcttacctccttccataagttttaaggttaaaatgtttctccgcactttttgcagtaacgaacatgttcgccgtcctcaagcactctgcgtcctactcttgtaggagctccgcacttgtcgcaaacatgcataaccttacaagcataaatcggtgtttcctgctttatgataccaccggtttcgcccatcttgcgcggcttcttatgctttgtggcaatagaaacgccctcgacaatgacagtgcgcttttcagcgtttacagacaaaaccttgccttttttgcccttgtcttttccgctgataacgattacctcgtcgccggacttgacgtgcatcttagtagacatcgtattcctcctattctagttcataacgctgcatagcagccgtttgatatcttaaaatatctgtatatatccaataatttatccgctgcaagcacagaaattaaagaacttccggagccaaagacaatatcttcatataatctttatctctcaattctcttgcaaccggaccaaatatacgggttcctcttggtgtcttatcgtctctgattaaaacagcggcgttctcatcaaatctaatttttgagccgtcgtttctcttaataccgttctttgtgcggacaattacagcctttacgacttcacccttcttaacaccgccgccgggcgttgcttttttaacagaagcaatgattacgtcgcctatatttccataacgtctgaaagaaccgcccataacacggatacaaaggatttccttagctccgctgttatcagcaacctttaaaacagtttgctgttgtaccataacggaattcctcctattcttcctatcttatttagctttctcaactacttcaaccagtctccatctcttatctttagagagaggtcttgtttccatgactttaactttatcgcctatgccgcatgtgttgttttcatcatgagccttaagcttataggttctcttcattaccttgccgtaaagcgggtgcttctcattttccttgattgcaactacaatcgtcttatccatcttatcgctcacaacttcgccgatacgagtcttacggtaattacgctcttccatttatctgcacctcctacgcatttatgtttgaattcaaaccgagttctttttcttttaatactgtcttgcacctagcgatttcctttttaacgctaaccattctcatcggattatcgagctggttggtagcgttttgaaaacgtaggttgaaaagttcttcttttaagtcttgaaccttatcttcaagctcttgcgttgaaaggtctcttatctcatttattttcattaactatcaccttccgtttcttggtcagcttttctgacaaacttacacttcatcggaagcttgtgcattgcaagacgcagcgcctcacgtgctacttcctcactaacaccgccaatttcaaacattacacggcccggcttaacaacggctacccagtactcaggtgcgcccttacctttacccatacgggtttcagccggcttctttgtaacgctcttgtcagggaatatcttaatccaaacctgaccgcctctctttgtataacgcgtcatagcaacacgggcagcctcaatctgattgcttgtaacccaagcaggactaagcgcctggataccgaattcaccgtaggaaaccttatttccgcgatgagctgtacccttcatacgtccgcggtgtactcttctatatttaactctctttggggataacattatcttctgcctcctctctgacttgcacctctctgctgtcttctagaagcgtctgacctattattgcttctgttttgagtacgtccgcctttatcagcgagaacctcaccgttgtagatccatgtcttaacaccaatcttaccataggttgtgttcgcctcagcaaatccgtaatcaatatccgctcttaatgtctggagagggattgtaccttcatgatagtgctcggttctggcaatttctgcgccgccaacacgaccggcaacctgtgtctttatacctttagcgccaagcttcatagctctgcccatacactgtttcatagcttttctgaaagatatacgtctctcaagctgtgacgcgatattttcagcaacaagctgagcgtccaaatcaggatttcttacttcgataacattcaggattattgtctttcctgtcatcttttcaagttccttcttcagcttttcaatctcgctgccgcccttaccgataacaatacccggcttgccggcatggattgagatacgaaccttgttcgcgaacttttctatttctatctttgaaaccccggcctggaataatttctttttcaagaatactcggaggttataatcctcaacgaggctgtcgccgaagtcctttttacctgcaaaccaacgtgaatcccagtccttgataacgccgactctgagaccatgtggattaactttttgacccatgcttttattcctcctatcttattccttctcctgaagttttattgtaatatgacttgttttcttattaattctaaacgcacgtccctgcgctcttgcctgaattctcttcagcgtcggtccctgatctgcataaacttccgaaacgtaaagcttttcaacatccatctggtggttgttttctgcatttgcgattgcggagttcaaaagcttctcaacaacaggacttgctgcttttggagtattcttaagaacaccgattgcttcgcccactgacttatttcttatcaagtcgataactacacgaacttttctcggcgcaatacgtacatgagtaacttttgctactgcttccatatctgtatggctcctttcaatactgtttccgccgccgggcaaattatattaaacctgcggctgatgatttctgcttaaataatccagctaaaaccgattttcttagcctgttgttttagcgccggcatgacctctgtaggttcttgtaggagcaaattctccaagcttgtggcctaccatgtcttcacttacatataccggaacatgctttcttccatcatacactgcaatggtatgtcctaccatctcagggaatattgtggaagctcttgaccatgtttttaatacgttcttttcattcttttcgttcatagcaactattcttgcgagaagtttctgatcaacgaaaggtccttttttaacacttctacccatatatatattccctccttatctagagttacgtctcttaacaataaacttgtcagacgctttcttcttgtttctggtcttgtaacctaaggttggcttaccccatggtgtaacagggctcggcataccgataggggacttaccttcaccaccaccgtgtggatggtcattcgggttcataacaacaccacgaacagtaggtctccagcccatatgacgctttctgccggctttacccaggttgatgttctcataatcaggatttcctacctgaccgattgtcgcacggcagttaagtctaaccattctaacctcgccgcttggcagtctaacctgtgcatagccgttttccttagccatgagctgtgcagtgttacctgcgctgcggaccatctgtccgccttttcccgggttaagctctatgttgtatatcatagtaccaaccggaatatctttaatctccatagcgttgcccggcttaatatccacgccttcgcctgagataaccttatcacccttctttaatccgagaggagcgataatgtaagtctttacaccatcctcatactggagcagagcgatgtttgctgatctgttcggatcatattcaattgacaaaacggtagcttccattccgtccttgtttctcttaaagtcaataactctgtattttcttttagtaccaccgccacggtgtctaacagtaattctaccgtacgagttacgtcccgctttgctgtgaagcggacgaagcagcgatttttcaggagcgaccttgtcaagctcctcaaatgtagaacatgtcatctgacgcagtgaaggtgtagtaggattatatttcttaattcccattttctatatctccttatctgcaaaattttaaggtatcgattaagcctcaaacagttcgatagttttgcttgactcagtcagctttacaacagctttcttccagtcagctctttttccaacgaacacgccctgtcttttaggctttccgctgtagttaattgtagtaaccttagcgacttcaaccttaaagatttcctcaacggctttctttatctgaatcttattcgcattttttgcaacttcaaaagtgtactttctatctgcgacctggtccatgcttttttcagttatgataggtcttctaataatatcgtgtgctaccattatgcgtacacctcctcaagtttctcaactgcatcttttaagataatgcactttgtgtggttaagcacttcataagtgttaatagcgccaacaaatgttgcgtcaacacctctgatgtttcttgctgagttaacaattttcttgtcgttctcaggaagaactataagcgccttttctgtaacatttaacttagcgagcatatcagcaacctgctttgtcttgaactccttgcaatcaagagcgtcaagaacgataatctcgctttcctcaacctttgaagataaagctgacttaagagcaagtctttttaccttcttgtttaatctatagctatagtctcttggcttaggaccgatagcgacgccgccgccgacccactgcggagcacggatactaccctgtcttgcacggcctgtacccttctgtctccacggcttgattccgccgcctctgacttctgtacgtgtcagtgttgactgtgtaccctgtctctgatttgccaagtagttaacaactacttcgtgcataacgtctttgtttactttaacaccaaaaacgctgtcatttaactccattgtgctgacaaccttaccgtcagcattataaacgtctactgtaggcatatctatatcctcctctctctgtggttttaagcgttagccttaactgcgttacgaacaacaaccaagccgcctttaggtcccggaatagaacccttaaccaacagaagattgcgctctttatctattttaactaaatcaagattctgaattgtaacctttacaacaccatagtgtcccggcatcttcttgcctttgaaaactcttgacgggtcagaacatgcgcccaatgaaccggggcctctgtgataatgtgaaccgtgagtcataggacctctgtgtgttccccatctcttgattgtacctgcgaaaccatgacctttgcttgttccggtaacgtccaaaacgtctccgtctgcaaactgttcaactgtaagctcgtcgccgacgttaagctctgcggcattgtcaagcttgaactctttaagatacttctttacaggcacgtttgccttttggaagtgtcccttttcaggtttgttcgcgcgtctttccttcttgtcctcataaccgacctgaacagctgtatagccgtcaacttcttcggtctttttctgtactacctgacatggtcctgcctggataacggaaacagggattaactgtccgtcctcagtgaagacttgtgtcatgccaatctttttacctaagattgctttcttcattattatttcctcctatattacacaagcattggtttaatgaaaaacatacctgcgggccagcggttgggattccaacataaccaaatttttggtaaactaaataaatttgttatcaatcctatattatggaaagcaataaactaaattttaagttctatatcaacaccagccggcaaatccaagtgcttaagcgcgtcgattgtcttgccgttcgggttaagaacgtcgataagtctcttgtgagttctaagttcaaactgctcacgagagtccttatacttatgaacagctctcaggatagtaacaacttcctttctagtaggaagcgggataggacccgatacctttgcacctgttctcttagctgtctcaacaatcttagcggcgctttggtcgataagatttgaatcataagctttaagtctgattctgattctctctgttgccataaaaaataccctccttattaaaataagtttacactgtgccgggcgtttcgcacagtttcataattaatcccgaataacgcatcctaacggatacgcattcgggtggaatagacacagtaatacatactcccgcaccagcataatgcgagccatgttacttctgtatttcgattaagtgtgaccttccgccctgtttttaaaaccggacaatctcccccgaaatttccaaaccaacgtaaaaacgttgtttgccacctccgagttcatcgtatgtctctgtcacgcttgattattatactatctgtggcggaaaatgtcaagaaaattttcagtaaaatttacacaaaattcggcttttaccacaagtttcaattcacaaatttgtgcattcctacaaaaatttttattttgcaaagatatggcggaagatgaggcataattatattattgatttttcaattgctaccagtttggagaatggtttttgaaaaattcacaccaaaactatccttatatataactccatataattttttattattttatttatggtgctatatatatattgaaggagtatctatttactttgtatgtgcccccatataatatctattattttacttataataaatgtttcgagttactattatattgaactcatcaaaaaagctgtgtgttcagcgaacatcggtagggcggctaatgccgccgcgttaggtgagccgtcatctgaacacgcagtgttcattatacaattttcttattaaaatcaaaaattttcttacatatgacaccatataattgttttattattttactttactaaaaaaactatttatatactttgtatatgaccccatataaaaaattttattattacataataaggtgtttgaaccatttctttttctcgcaagaaaaagaaacgcttcaccaaagaaaaagtgcttgctcgcttaggtcgcctgcggctccaaggggcgctcgcaccccgctcatttcaccatgaagcacggcttcatgatgaaaaaagccttgttttttcccgttgactttgtgtactaccgtgaataaagatatttcgaattcctattaatttaaatcaccaaaaaagctggggttcagcgaacatcggcagggcgcatttatgcgccgcgttaggtgagccatcatctgaacacgcagtgttcattatatatgttgcttttatatcattatattaacctttaggataaggcttaatttcatttgtgcgtccaactaaataatctatgcttgtattatatatatcagctaatttatcaagtacatcaaccggagtttgtatgttttccaattcatagtcagaatatgttgtttgatgaacatttatttcctttgcaatctgtttttgtgtcaaatcattatcttcacgcaaatctttgattcgatatttcaatttaatcacctcatacaaagattaatataagggaaaatatcttattgacttttaagggaatttcccttataataataatgaaaataaaaactgaaaattatttttttgatttacctctaggatatggttttttttcatcagtacgtccgactagataatctatacttgttttatagaaatcagctaacttattaagtactgaaaccggaatattcaaatcacccaattcatatgatgaatatgttgtctgatgaatattcaaaagatttgctatatccgtttgagttaagtctttatcttcacgtaaatctctaatacgataattcaatttaatcacccttcgcaaagcttaacataaggcaaattcccttattaacttttaaggtaaattcccttaaaagctatcttttgtaaatagaaaaactttatttatgaaaaaataaaatgcttataagattaaatgaatctgaagattaaataatttttatctataaaattattaaaggtctatggaggaaaaaatgttttgtgaggaatgggcagaaaataaatttaatgatgatttgaaagagtggtttccaaaatataaagaatatgagaaaaagggatttaaaatagaagctgacacaacaatatttaaggtatactataaaaaatatactttttatatttctctatttaaaaaagaagaagataatttgttaaagaattattggagaataagaaatagtacattaggtgaattttgctgtgaggtaaaaatcaatgaagacccggatgatatggaggcggttatatataatgaaataataaatatagtagataaaaaataaaataactgaaaaaagctaaatgtgtggaaattaatcaaatatgtattcagcggattcatctaaaatttaaaaaaataatatgaataatatgagtcaagattaaacaatctattttgaatccgctgaatacatatttgaaactcaaaactgctgtaatataaaattgaattaaaagaacttcggttgatagacttaataaataaaaaagctccctgtaaatgaacctttccggcttgtactgcacgcacaaacctgtttgttcaaagaccgggagcttttatgtttcgtgtcaatatactatttgttaaaccctgaatttttgtgtgattattcgccgataacttttttaatataatcagctatttcaggaacctggcagtttgcaaaaaacaattccttgaacttttcaccgcttacggttgttttcagaaagtcctggtcaatgttctcaagaacatacataatatcgtgatgtgtaatctttttaacctcgtcaagaatctttttgtttctctgttccggtacaaccctctcttttggataaccgccgcccatctctgttgagaaaagtttttcaaaagtatagtcaaggttaagctcagcaccccatccaaagccctgggcaaacggcatagctatagcgtttccgtcattaacctgtccaaaaagatatgcgtcaagcgggcttgtaacgtgtccgcacaaaacgcccgggaatgagttgagcgccagcatagcgccctcgcctgtgccgcagcctgtaacgacaaaatctacagcttttgagttaagcagtatagcagccaaaagcccgttcataacatatgtaagctgagtttcatcgtctgccgaatacatcccgaaatttaacacttcgtgtcccattggttcaactgtattttttagtgaattgtaaattatctcattctttgcagcctgagaattctcattaatcaaagcaatcttcatttttttcatactcctttaaataattctttctttttttattcttttatagtataatgataaataattaatttgtcaaccaaaatcaaaggagaaatgaatcatggagcgtccggttaaatttctggcttcgctgtctgctgacagtgtaaccgatatggaacttataaagtccagaatatcagattttaaaggatatgggcttgatggttttgtttttgctctcgaagattactcagacgatatagaatatatgaacgatgagtttattaaaaaagttagtgaaataatcttgtttactaaatctgaaggtttggaaatatggctggaagcgaaaccgactgagcctcctgaagtcgggatgctgtcctcatggctggaatatgacggcggcactgttaagcagtgctgctcgcctgaaagaagtccttttgattacacaaattccgctgtcttaattgacagcgtattggaacgttataaatcagggctttcaaaagaagcttatggatatttggcaggattcacaagtgaagttcctgatttttccggtcaggacagtgaatatccggcagttccgtggtatgatgagctggaaaccgagtatactgaagaatttgacggcgatatattttcaaatcttaaatctctttttgaagacaatgaagatgcgtcagagtttaaagcgtggtattggcaaaaaataacagaccgcatgggagaaaccgcattaatatcagagtggtgcaaagagaatgaaaagggatattttccgcagataaaaacgaatgcaaacccgtattcccaagtcttacagaccggatcagcactgcaatatctgcgccggtttaatttgccttctgtcagtttttcgggcaagacagctgtgagtcattttctgcctgtctcggtttcaagccttgcgaaacagtttggcagcggtacggcgggcgcctctgttttaggaggtttaggctggggaatacgccccggtgaatttgaagagtatatgaccaggcttatagaatgcggtataaatatgtttgtatttcataccagctttctgcacctgaattataaaagcctgagccggaatcaaatttcatttcctactcatataacctggaaaaaggttgttccgcaaatattggagcgattgagagagaaagccgaagatgagacaaaaagaccgcataagattttagtcgtctgccctacgagagctatttgggaacactttgttccaacatcggacaaaacaatatcatatgattacagtcaaaacgttgcggacatatgcggacggctttatgaaatgaacaggcgctttgacctgacagatgaaattatatttgaggaaaatgcagatttttcaggcggcggtatgaaactcggagaagctgaatatgggactttgctgacggttcctggggcgtcgttttcaaaaaagggtatggtcgcgatagaaatggcaaaagccaacggagttcgcatcttaaacgacatacctaaatctgatacagaaatcattcctcttgaccaaatcagacagctaaccaaagaagtagtgccaatcagcactgttcaggacagctggaccataacgcttccgaaagaaaaccgttttctgctcgaatcatcatataaagacggttcatttatatgcgagtttaatgttgatgatgaatttgattccgatttaactttgctggtaactgacaacaataacgaggtcagcataaacaatattttagtccgcccgataatgaacgactgccttgggaattattataatataacgagtaatgttttaggcggaaaaaatactgtgatggcaagcggcggcgacagaccggttttctgtttggtgggcgactttaaggtgacggccaatcaaggataccgaggatttgacgacagacaggtgcagacaaggtatgactttacggtcaaaaacacaggcatggacagcgagaacaatatgattcgctgcggctatcctttctgccgtgattatgtttcagcaaaaaaggttatatatattgaggagaatattaacaaacctcagattaaactggactgcagctgctccgcggtaattgaagtgttttttgacaatgagtctttagggtttgtttatgagggcagcgagacactgcctttgccgtcaattgcggcggaagaacgtcatctgatagagatacactgttacccgtcggcctttaacgccttcggcagacatcgctcactgttcggagactctgaaaatagcagcggtttaaatttgacctatggggattcacaggacttaaaatttacactttggaaaatacccagagatatagagctgattcaagagttttgagcataatattgcttataagtaaacattttgtaaactcatcagttttgtagaaaaataaggtttacaaaaatttaggtgtgtgttattattactacataaacatgggttttaatatataataatcaaacattgaattttaataataatgttttaaaattcacttttcagccaatataattatttttcaaacatttgatatatatacccaattattattcgggaggcgcaaaatatggacgcatttaatataaatggcgtacagccggcaatgaatgagcacgcacagctccaaactctcgagcataaaaacgagactaacgagagagaaaaatttatccggaaactattaatgggcaacagcgattttaatccaaagaccgccgcggaactgggcattaagtttggagaaaataatttttctgtgatactcgtaagaataaataagaccgaagacctgacaatttcagacttaccaagcataattttcgctattagaaatattggcgaggaattgtatggcgagagttctgaatgctatggcgttgaaacagacggcgtaacagttgcctttttgctcaatcacggttctgacacaaaatttatatcagagcagtcagctgatttaaagaggcatatcgttgagttgttcggtgtcaacacaaccctttctttgtgcactcaaaaggattgtccggtgagcgattgccaaatattatataataaagccaagtatgctatgctttatagattatcgtttaagccctattcaattattgattatgacaagactttatcaatgtccaggctgagctgcgaatacccgagtctgcttgagcgggagatttttgaatgtatacatgcgcgtaacgaagaagttttagaccgtgcaatttcggcgtttataggaacagtggataagatgtcgtatgataccatagttcttcatactgcgaggctgctgatagcggtagataatttgactattgacagttccgggaataacagcgttgttcacaacagcgttatagaggacttaagcacgcttgagtcaattgatgatctgacaagatttataaagtcgcggtgtatggagataatggatattatatccgcccaaaagcccgatacaaagaaagatatgatagtcactaatataatcaactatataaatgacaattacaaagaccctgaactgtcggttgaggcgatagccgcaaatgttaacagaagttcgaattatattaggagcatattcaaaaagagccagggcgtttctatttcggaatatttggcacagaagcgttttgaccaggtatgcaaaatgctgatagaaaccaatctgaccgccagggatataggaagagccgtaggtctgaattcgggaagttatttttacacctcgtttaaaaagtataccggctgcacgcccgacagttacagaaaggcgcaccaagctaaaatttttgataataagtaatatctttgtatagtaattatattttatctaaactttatatcgtatcacaaagattagacgttaataaattaaatatttaagaatgagttcggtattcaaccgagctcattttttaacttcaccggtattcagtgtatctaaaatcatcaactataaaactctatctctttaattaaattttccgcattaaaaatttattctcaatagtaaatcttttaagcggttaagtcctttaatccgccaaaaagttttctattgacccctggctcatgcagtctatttttcttgacacactttaagtaatatcaggcctttatcatatcttagtttgacttttcttgtgaaaccgcattacaagatctcatcttagttctactataaaatttttcatttttttcttctataaatattcattaccgctttttaagccaaatttgcaaattccaactaaaactccctttctccggcattatattattggttcttcgtaattaaaacattttattctcatatctattattaacaaatattatatatttagttttctcataaaaatatgcacctccaagagtgtttaactttcgaggtgcatatcatttgtcttaaaattttataaaactatataaaacctaactataaaaataatatattatttaatctaataacgactaataaaagataacatgcttttacgcaatttcttagtaaaatgtctgctgcttttatgtactatactgcttctcctgcctgctgtttatatgagctaagcatattttctatatcctctttggtttttaaactaagaaaagaaaacggctttgtcagagacttctcaatcatggctattccctcatgtgttttcccaagatttattaaaacctctccatatccgtaatatgcttccgggaatctcggctcgggttccctgtttattaaatcttcatatatcttttccgcctctttatactcacccattaaactgtaagtatcggctagattatcaacaattatattgtcatcgctgttatagtcatacgcttctttgttaaaagccaaggctttttcataatcaccgctgagattatacattattcctaaattctgataaatattagtgttcttaaacccctggttatatacgtcctccagctttcctaccgccagttcaatatccccttctttccaggcaaccagcgcctgaagagacattatcctgaacctatcggcagacgcaggtttagacagcatataagccatgctgaatacattcttagccgctgccaattccccgcatctgagacaattgtaaccaaacagaatcttatcccctatacctaaatttcctaccttgtcggcaattctgaaaatcttaagcgctccgttatagtcacccttgctatatttatatttggcaaacagcgcaacaataccggcacgctttactattataaatacaagagccaccaaaagcagcagcttccaaaccaaatcaaacataaaaatgctccttaaaccaaattattcactgttctgggatatggtataacatccctaatattctgcatccctgtcacatacataactaaacgttcaaatccaagaccaaatccggcgtgtttacaggttccataacgtctcaggtcaagataacgcttatagtcctcctgagatagacccagttcctccatacgctcctcaagaacgctcagccgctcttcacgctgactgccgcctattatttcgcctactccgggaactaaacagtccactgccgcaacagtctttccgtcatcattcagtctcatataaaacgctttgatatcctttggataatcggttacaaacacaggacgcttataaacctcttctgtcaaatatctctcatgctctgtttgtaagtcaatcccccattcaaccgggaagttaaactctttttttgcggcctttagtttttccaccgcctcagtataggttattcttacaaaactgttatccgcaacattattcagccgctccagcagacccttgtccacaaaactgttgaagaagttaagctcatcgcccgcctcaaacagaacaaactttatcagatactttaagaggtcctccgccaaatccatatcctctttcagtccggcaaacgccatttcgggctcaaccatccaaaactccgccgcatgacgggctgtgttgctgttttcagctctgaatgtaggtccaaaagtatatatattcccaaaagccatggcaaagtcctcgccctcaagctgtccgctcactgtaagagaagccggctttccgaaaaattctcgcttttcagcactgtttgggtctcccgctgtcagtctgaacatctctccggctccttcgcagtcgcttccggttatgataggagtattgacatatataaacccgtgttccgaaaaatatctgtgaatagcctgagccagcatagaacgaactctgaaaacggctgacagcgaattcgtcctcggtctcagatgaggaatagttctcaaaaactcaaacgaatgccttttcttctgcaaaggataatccggcgcgctgacgccttgtatttctacttcagacgctttcagctcaaatggctgtttggcttccggcgtgaattccagatttcctttaaccgagacagaagaaccgacgctcagttttgaaacctctgaatagttctccagcttatcttcttcaataacgatttgaaggttcttaaatgaagacccgtcatttaattctataaacccaaaactcttagaacacctaagtgttcttatccagccgcttacgctgactgaatctccttcaaatctatttttatataactcgcttattctcataggaatctacctccggttatttacaaaaacgctcctgaggattctttgtataatcctttataagttcagctctgggatatccgcggctgttctctactgaagctatgtaaaaacctctgccataataaaaccttatcagaggggtcacgtgggaacctgtatgcagacgcaagtatttcacgccgttctcacgcataacgctgtcaacaacattcatcagcgtttttcctataccgttattcctctcgctggacttaaccgcgaatctgctcagatacgcctcgttattgtcctggagctcgatacgaaccgcacctataggctcgttgtctataaaaactacatagacctctttggtctctatatcatgcttaacatcatcgtatgtttcgttaagagcctctatatcgtaactcagaccggccatttcacaatatttcaaaaacgcgtcctttgttatcttgatgattgcaggaatatcctcctcgctggctctttttacctcaaacgcataaagcttatccattacttattgtcacctaccatcaacatagccataaccgccttttgggcatgaagtctgttctctgcctcgtcaaatataatacttcttccgctgtcaataacatcctctgtcacttcatagcctctgtacgccggcaagcagtgcataaacacactgtcaggctttgagtacccgaataattccgaattcacctgataatctttaaatatttcagctctctctgccttttccgcttcttgacccatacttgcccatgtatcagtatagacaacgtctgcgtcccttatagcttctacagggtcattggttaaaataaccttgcttcccatgcttttcgcgtcctcaacagcgtttgccacaatctccttatcgcattcatagcctgccggagttccgatacttatatccattcccgctttagcgcaggcatacatcagcgaatgtgcaacgttattgccgtcgcctatatacgccaatttaaggcctcggagctgacccttgtgttcctgtatagtcatcaaatctgcaagcgcctgacacgggtgaagcaaatcagtaagaccgttaataatcggaatagtgccgtactttgctaaatccagaacgtcctgatggtcaaatgttctaatcatgattccgtctaaaaatctgctcagaacattagccgtatcgtaaatagtctcgcctctgcccagctgaatatcattcgagcttaaaaacagcgcctgaccgccgagctgatacattccaacctcgaaagacacacgggttctggttgacgacttcgtaaatatcatacccaaagttttaccttttaatatatggtgttctttcccagatttttgttctttcttgagcttatcagccaaagataaaagctgggaaaactcctcatgtgtgatgtcatgcaaactaataaaatgtttcatatttatattgcctcctttaaagcgttaattaaataatcaatatcgggttttgtcacaataagcggcggtactatacgcagaaccctgtcgcccacaacgcctaccaaaactttattcgccctaagcttttcacctatctctttggctataggttctgaaaactccactccgcacatcagtccgcggccgcgcacatctgcaatttttgaatttgcatccgctagctgtcttaatttatcaaataagtatgaacctgtctctccgacattttccaatactccgccgtgtataagttcatccaaaaccaccaatccggccctggttgacagagggtttcctccgaaagtggttccatggtcaccaggtttaaacgctgaagcaaatttctcattggcgcaaaaggctcctattggaactcctccgcccaacccctttgccattgtgacaatgtcaggttctaaatcataaagctcatatgcaaaaagtttcccggttctgccgattccggtctgaacctcatccacaataagcgcaatgtcattttttccgcaaagttcagccgccttttccgcaaactcccggctcacaggattcactccgctctcgccctgtatcagttcaatcataattccggcggtattttcattgaccgcattttccaatgctgatatatcgtctctgtcgatatgaacaaacttttctatcaaaggctgatacggcgcttgatatttgggctgacctgtagctgccacagtggccagggttcgtccgtgaaacgagtttttaagggtaacaaattcaatcttatttttatttcctttctctacctgatattttttcgcaagttttatcgcgccttcatttgcctcggcgcctgtgctgcaaaaaaacactctgtcgccgcagctgtgcttaaccagtatttctgcaagtctcgcttgattttcaacgtaatatacgctggatgtatgtataagctgttttacttgttcggtcagttcacgggtcagtctctcatggttatatcccagtgagcagacagctatgcccgcaaaaaaatccttatatacatttccgtccgttgacgtaagttctattccgtttccctcagtaaaacataaaggtattctgtcgccaaaggtattcatataatactttttatccaaatcgattacttgttccaaactcatatgctcttccatctttttatctccttttcctgcaagacgccctatcacatactcatatccgccatctgtatgcggaattatacaattagagcaatccttaatcagtttgccattcctatcatatatccatttgcagtttccgccgcagtctgtactatataaaggacaaaagcagaacagacaatttatccgctccgctttatgacaagggtaatattcacaatccttattttcaaaaaaattatatcccataactagtcctgaagcgctacaaccactttacggtttggctcctcgccaacactgtaggtctttatccggtcattatcctgaagagcagaatgaattattcttctctcgttcggagacataggttcaagggtgacgggctttctctctctgagaacgcgtctctctaagctatgcgccagctttatcagggtctcctcacgctttgcacgatatccttcagtatcaatatttacctttatataggaatttttctccctattgacatacaggctggtaagatactgaacagcgtcaagcgtatcaccgcgctttcctataagcaagcccattctctcgcctgaaacttcaacatccactgcgcttccgccgtttgaagcctcaaccttagcctccggaagccccatcatgtgtataacattctcagcaaaatactgtgcgtcgctcactgacttttctgtgacctcacggtttctttcctttttaggagcctgttcctgctgttttgacgtctcctgctgtttttcagtctcgtcggcagaagtctgaacggcagcctgtttcttaaccggctgttccttcttagccgccggctgttctttttttatcggcggtttttctatttcagtgttcttattattttgttttggagcatcagtttttttcgccgactcagcggcttttctctcacgaacctgtcttcgctgctctctcgcgttgcggagctgttcttcctcctgcgcttccttcgtaatccaagccgaaataataacctctctgccaagcagccgtccaagaattcctttgccgatttctctctcaaccgtataagaaagttcctcaatggaaactccgaattcttcagcggcaagccttaacgcttcctctttactttttgcgtttttttctatttttcttggcattttccatttcctccttaacgatatcatccgttaaatccacattagcaactttattaatcgcaatctgctgcaccaactggagaatactgctcaaaatccagtagaaacctatagctgccggcattgtaaaagcaatccacgccgagaaaagcggcatcattatcatcattgtcttcattggattcggcttttccataccgttctcatctttctgaaccggttgcggcggctgcattgcctgagtgagcttagatgtcagatatgagcttccgccggctataatcggtatcagccacaatcctatcgtattccaagtgattccgccttctggaagctttccggtaatcagtcctatcaagccccaaagatccggggttgccgaaagatcgatcccgaaaaagttaaagtctataagcgtatatgttatacctgtatccgttatccaatgactgttcatgatagccggatactcgtgcagaaatctggcaatctgaatttcatactgtccgaaattcttaaactgctgttctacaaatacattgagcgagtctattttcatagacgaaagcagctgattaacagcgtcagggttccctgctccccaatcctcaattgcgcttacaattctccacacatcagaaccgcctacgcccattatgtatataataggctttttcacaacccaatacagtgccaaaagtataggcagctgtatcagcattggaagacatccgctcatggggtttatcttatacttctgataaagcttcatcgtttcctgattaagcttgtctttatcattgccgtacttcttctggatttccattaaaagcggctgaagcttctgagttttcagcattgatttttgctgcttaaccgtaagcggcattaaaatcagtttaataataattgtaaacaaaataattgctataccatagttactggttatagtatacatgagtttgaggacccagccaaggcccagcattatataggacaattcgatgccctcctaacttctatttttacttttttatggataatctattccgcccttattcataggattgcagcgcagaactctccacaccgccataaacaatccctttatcagcccatacttttcaactgccataatagcatattgagaacacgtaggataaaatctgcatgtcggtctgccctttataggcgaaatatatttttgatacccttttatacatttaataaataactttttcatttgatattcatccgttctgttgccattggcaaagtcccgaaattaagctattttaataataacacgaaaaggaaaaatttgcaacagtttttaattgtttttttatgtcaaaaaaactcatactcccgccgctttaatcaccttagaaacagcggtttcaaaatctgctctcagacgggcaggatttgcgtcgacagcggcggcgcgcgctacaataacaaaatcgcagcttttcttaaccgaaccgcttaatcttttgctggaataatctgcaaacagtgctctgagacgccgtttagcacggtttctcttcactgcgcatcccacctttttgccggcggtcaggccaagacggtctgttccctgccgatttggcatagcatacacaaccaaagtggaagtaacggccgatttgccctgtctgtacaggcgcctgaaatctgtatttcgctttaatacggctattcctttcataaactctcccgtctcataaaaataatataaaaatccctctgccgttatcaatttttacctgcttcttcaacagcaaattaaataacagctgaataataattttacttaataaacaaaaagacgccatgaccggcgtctatttcttcattaagcagacaggctctttctgcccttgagccttcttctcgccaatactttgcggccatttttagtgctcattctctttctaaagccatgaaccttagatctgtgtctctttttaggctgatatgttctaagcattctatatccctccttaaaacttctatattattactgcaatttttaacgtaatataatactaatacggcagttattacctgcctacgaaaaatctataatattctatcacgacttacatgaattgtcaagaattatttttttgcatattagtaaaaataaatttttaaaaaaatttttttctgtttaattttatgattttcgcatatattgttacttcaaaattttcaatcaacaatatttggtatcaaccatttttgcgtggtttttggaaaaattttttagctattttggtgttgaaaaatgagtttctttctgttaaaatatattacaacaatgtaacagcatagggaatagggattagagattaggaatttagagcgcttcactttgcatggcggccttaacgccggtgccgtaattccgtattacagacctaagccacgacaataggtataagaggagaagagagacgttggaaaatattaatgacatttggggaaacgttactaaacagctccgtgacgaaatgtccacggtagcttttgatacttggataaagccaatcaagccggttgaggtagcaggggattctattacgctctgcgtacccggagggctgcaaaaaggaagcctgaacaaaagtatgataatgacaaaataccgctcgcttatagagagcagtataaaaaatgtgaccggtaaatcccttgatttggatgtatgctttgagacaaacagcggcgttcaggcagacgaccctattaaacaggaaagcgcgctgaatcctaaatacacatttgataattttatagtaggaaataacaacaaccttgctcaagcggcgtcgttagcagtggccgaaactccggcgcataagtataacccgctttttatatacggaggaagcggtctcggcaagactcatcttatccaggccatagggaatttttatcttaccaataatcccggaaaacgcgtcctatataccacaagtgaaaaatttacatatgaattggtaaacgctatacgtgaaaagacaaatcaggattttagaaataagcacagaactgtagaccttttgcttatggacgatgtccagtttcttgcaactaaagaattggcgcaggaagaattcttccatactttcaacgctttatacgaggcagggaagcagatcgttctgacgtctgaccgcctgccgtccgaaacgcctcatctagcggacaggctcaaaaccagattccaaatgggtttgctggctgacatccagcctcctgactacgagacccgtctcgcaattcttaagagcaagattgaggacgaatatttcacctttgacgaggaaatcgtcgagtatgttgcaaacaatattacttctaatgttagagaccttgagggggctttaaagaggattctggcctatgctggaattgagagaaccaacaccatatccatggagctggcacagaaagcgcttaaagaaatattatctactcttccgcagcgcaatataactatcagcgttattattgacgaagtagaaaaatactaccgccttcccaaaggctcgcttatcacaaagaaacgttcaaatgatatagcatatccccgtcatattgccatgtatatttcaagagtaatacttgacgagtcatatgccagcattggcgatgcattcaaacgagaccattccacggttatgaacgcagttaaaaaaattaaaaagatggtaaccgaagacactgagcttcaggaaataataaatgaacttgttactaatataaaaaaggactaaagcataatgaaaatgtttgatactatagccgctattgccacccctctcggatcgggtggcgttgccattattagagtaagcggggctgattctgaaaaagtttcccaaaacgttgtgaaaacaaaatccggtaaaaaactgacggagcttgaaagtcataaactgacgctgtcggacattcacaaagccggtgatgaatcagcttctgtcgaccaggcgctcgtctctgtaatgcgcgctccgcattcttataccggagaaaccgttgtggaaataaactgccacggcggatactttgccgccggtctgattttaaacgagctgctttcctgcggcgccagactggctgaagcgggagagtttacacgcagggcttttataaacggtaaaaccgatatgacaggcgcagaggctgctatggatattatcgattcaacctccggtttgggtctcggcaatgccgccaacgtgctgaatggcgctcttgctgaaaaaatcaatgatatacggcaggatattatggaaatcacatctcatatatccgcagctgttgactatcctgacgaggttgatccacttacagatgaagaagtattggagaagttgaatcttataagttctaaaatttctgaacttatagacagctttgaaaccggcaaaatattgcgtgatggaatccacaccgttattgtcggaaagccaaacgtaggcaaatcttcgcttcttaatgcgctttcacgctccgatcgggcaattgtgacagatatccccggaaccacacgggatacaattgaggaatatataaatataaaaggagcgtcgcttcgtcttctcgacacagccgggatacgggctgaggtttctgacgaggttgaacaaatcggaattgaccgcgcaatggagaatattaagattgcagacctttgcctatttgttatagacagcaattcaaaacttgaaccggaagacgaaaagatagcaaaagcactgaaaggcaaaaccactattgttatacttaataagaccgataaaagtgcggaaataactcctatagaactaaaaaacaggtttggttttgaaacagatgatatagtcgaaacttccactccgaaagacaaaactccggcaggtatagaaaaacttgaagaacgaataaccgaaaagtttgctctgggcacaataaaaagcggcgaagtatacgtatcaaacacaagacaaagagattctctggtaaaagcgagagagtctgtagatctagctttaaacggtgttggtatgccttttgatcttctatatgtagacttagaagacacactttctgcattaggagaaataacaggcgctacagtacaggaagaaattatagaccaagtattttcaagattttgcgtcggaaaataaaattcatcagaggtaatcatatggacaaaattgaattaagctttgaatttgttgaaaagtatgttcgctttgcaaatccgcagtatatacaagtctatctatatacaaaatatcttttaaatcataatgatgagatgccaaacgccgaaactgtggccggcgggctttgtctaccggcggacaggataaaatttatattcggatattgggtaagtctcggagagatgagacagatagatgaagatacctatgaattcacagaaaaagacaaaagcgacaagaatccttcagctagaccgactaagagaaagagatccaatgccaaaatgcggccgtcctataaaagctctgagatagattctgcggcagacaaaaatcaagttctgtccggaatgttttatcaggcggaaagtatactcggacacatgctctcaggaaatgagatagagttgctatactcattctatgactggctcgggcttccatgcgaagttattgtaatgctgctcagctatgccgctaagcagggcaaagtcggaaagcgttacttagaaacagtagctattgactgggcggacaaaggaatagatacttttgacaaagcggaggaatacataacgcagctcgaggaaataggaagcaatgagcacaaaatccgcacaatactgggcatttatgaccgtgcgctcacacaaaccgaaaagaaatatataagcgcatggacagaggaactcaatatttctcccgaacttgtttcgctggcatatgataaaacggttgaaaatacaggaaagctttcatttgcatatatgaataaaattcttgtatcatggcacggagaaggtattaaagatgctgacggtgtgaaacggagcgaggaaatatacggaaaaacaaaagggcaaaaaagcaaaaaagcagaacaaaattccaatgtccaaaagagcaaatttaataattataacgatacaaacaaaacagactatgacgccttagaggaaaaacttcttgatatgatgcttgacaactagctacatattcttatataatcgtttaaaaaactacgaattaaaaataatgccatagcggcagaacacagggtggtaatatgcagtcggcacacgcgcttgccatgaatgaactgaataagataagagaaaataatataaccgagcttgaaagaaaaaaggctgaaatacgcactgctgctcccgaatactcaaaaatcgaatccgaccttatgaagggcggcaacgccttactgcgttcggttcttcacggcggcaaagattttgaaaaaattaaaaattttattcaagagaaacaaaagaaaaaaatttctattttaaaaagcttaaatctgcctgacgattatcttgatgaacattttaattgtgatatatgccatgataccggatttgacgagaacggtaaaaagtgtgtatgtctgaaagcgctgactatgaaatatattgatataaactcaaatatgacagcactcatgaaaaaacaaacctttgaaaattttgacttttcattgttttcacctgtgcctgacaacagtggtaaatcatcgctggatattgcaaaaacagtatataattcagctaaagacttttccgataattttgaaaacgggtctaatcttatgttaaaagggaacgccggcaccgggaaaacttatatttcaagctgtattgcaaaccgggccctcgcccgcggaaagactgtatattatcagacgtcgtacaagttatgcgagacgcttgaaaatgtaaagttcggcaaatatgaaaatcctgacgagctgagcagcgcagtcagcgttataaagtacataaactcagttgacttgcttataatagacgacttaggaacagagttcataactcagtttaccgcggccgctttattcgacctcataaacacaagactgataaataataagtccacagttatatcaactaatcttgattttgacagcatggaaaaactatacagctcccgttttacttcaagaattttaggagattttaaaataatgataattacaggcggagatttaaggaaacaaatgtttgagaaaagataaattgctagtataatggtctctgcatatatacaacctgaattagctttttctgtttttgtttttattatgtataagttgttaaaaatccctctatgataaaaacatagagggatttttcttacctgcaaatcaataaaactttataggacagcaaaaactcatatctattccgttctctatatcatatagactatggacagctatgaaaattataaaactactattctccaaaatatagcggtgaatgcaaaagcattaacaacaatgataattaagttagttcaaatctccatttaatttctgcaataacaaaaaactttaattttagaaagagttttaatctctttgtcatacttaaagtcattaaaaagaacattcatacaaaaatttttccgtctgattattttcggcgattactttttcataagatgaatacacacttaatttagtaaaacctatatcatacaagcatgaattaatttcgtccagctcataaagacgcgtttgaaaatccatcaattccttatatctgcctaaattattttatatctcctcggaaacacaaatttcagtgtgtttaaatctttattaaaacttactcaaatctaatacagcttcctacatccaaaaagctattaaatgctgaactgtaaagtataatgttggattcgctttcattattgaatcctcggtatgcgcaaagatggacaaaaagcagagtactaaagtgattactgaaagcgttaagattattcctgcaaactttctcctgctgtgttcgttatccctcagcatttcataataagcaaacgccgttataatagttccgataaaggctatccacacaaaatctgtgaagtacctggtaagaagaccggccatctgcgcgtctagtattgccaaaattaccgcaaaaatcaccgagaagtatacaaatctataagaacgcctgtcggaaaaactatttttcttaaaagcaccgtatagtccaataaccaaaattggatacagccataacactccgcccattaacatctcagttaatgtaagtccctgatagacagttgccgcattaaagtcatgaataaatggaaatactgcgtccatattaaacggctggagtaaataagtaaatattcccaacccggttctgccccaaacaaacccacgcttagtcatatcatttgtggttaaattataatttgctccaaaatcaaacggggaaccaaatcttgcgtaattataccacattaccgccgctccgactatcacaaacggcagacatacagcaacagtctgtttcaaactcttttttgaaaaaagcgtgcgttccttaaatactgagttccagaataaaattattccaaacacagtcactacaagaagctgaggccggcaccctgcaatcattgccacgcaagcggaacctatcgccaatctccaggatataagtgaggttgttccgtcctcattttttctttccgctgacagccaaaacgctaatccaaacaggccaaacattatagcccccaaacttggaaccaaatagaagtcaggtttctgcacagcatacgcaagacatgccgccgctccaaacacaaccgacaataacaaatataaggcaaacggcgtgttcctaaaccactttttaataatctcccaaagcagcagcagtatgcctatcataatcataattccaaaaataaatactgcaatgtaatttggcaaatcatttccggtaattaagttatacggcaaataaagcagaatcgcaggcgccgctccaaagtatacataatactttccatcatagtacgcatggtcccatttgaaagctacattctgagcatacctctccctgaaatcatatggattgtccatattcttcaatgctgaagacggttcaaaatcaagatacaagtgaccttccttaatcgcatcgattaaagaatagtactgcctatggtgctcataacttttatgccattccaatacacctgtattccagtgtatcatgttccaaaaagtaataatttggatagcaaccaatgcaagagtaacaattctctgccagtttttacttaaatcagttttataattatacacaaaagattttggtcttaaaacatatagcaacataagcgttaaggataatagtaaaaatctaatccaggaaaacataagcggaacgcggacattaagacctatattatctttgcttatagtttttccgttcataccgtttacagtgattttgaaatcctttacctctccgctaaaacgaagtcttatatactcactggactttacatctgttaaaacggtgcgcgacggagcagaaaaataactggaattcgcctcatcaactgctgataaggttatatcagccactccccccttattgcttccgggtttaaaatacaaatacttcagttcctcatttaaatttttatattcaattgtcgcgctgtcacttgtgaacttcaagtcagttccggattcatttatccctgataaagtcatttctgcgtctacttttttatcaaaagccgaatttacccatttaaagttaaatataaataactcgcaaataagcatgaccgctagaattattataaaaactacactatatttctttagagtttcctccgcaaaaaaatgttttaaattatcttcctttagtcttttcatatcagatttctccttttatgataaaaccaaagcgccgccattcccaataaggttaaaatggtgaccgcgtcagctagtttaaaactccataatcctgaatactttattttaacagtatcagttccgttttgcagatttattctcagaacgtggtttgtcccgtcctcggtttccagcttgtttccattgttatctttagcagaatatcctggatagtatagaagcggaacttcaatataagaaccgtttttagcacccgaaatctcagcttcgatattagtccctgacttataataactgtccaccttaactccgtcgctggtctcatacttttcagccgtcagcctgtcagcatttgttccaaccacataatattcattatcaagcccaacagctccgcttgtggataccgcataaccttttttaagcgccgggtccagctgtgttgtgtaagcagttccccatgatacaaatgttattgtgcatacaaaacatgtcaccattataacgattcgttttgacatatcactttttgaaactgcaccgattattattgccgccgcaatacagaatattggagacgccaaactcaaaaatctccacggcattctcactgttccggcaaacatattaatcagcttattttgctgcaggagctcccacggaaacagagttgttgccataaacagaagcagcacaccaaaagcaaaaataccaaatacaaaagactcattctttatctcctttttctttctgaatataaagtaagcaatccctataatcaggcaaattgtaacccctacgcccagcgacagtgacatatcgcttctcatgcctttgtcgagaagctgtgaataaccaaaatttgtgttaaatatattaaataactgagtcgggaaaatagcatttaagaaaaattccgtattctcctttgtatgccttatcgccatatccaagccaaaataatatgttataaatgacaccaaataccataagttgagcaaaaccgtaagaactccagccttaaaaaatcctaaccagcgtctgtcacttataaaattcttgataaacatcagcacagcggcaataatagttatcaccacaaacaccgtgcttataacatgcgactgatatactccagtgcatcccaaagccagaacccaccactttttcttatcgcctttaagcaaacaatacaacccataaattacgagcgggaaaaacaccatggctaaagcttcacctatagcagccctgtaatataaattcataacgcgccaagttgacagcgtatatatgatcgacgctataagcccgacatacttagactttgacattccctttgcggaataatacattataagcgccgtggcaacattaacaccaaacaaaaatgtgttatatgccatgacgggtgaaagtccaaagattctcaaaaccgcaggaaaatacaaaaacagttccggataaacgctcgcggttatatatccatatccgttattatgcgtaggatgaattctgaccgggaactgacccgacaagattccatccttaattccctctattctgtataaatgaaagtttaaatcatgtccgaatccaatagttccgctaaacagcggataactagcaaacaccgctcccaaaagcaccagcataatcaccgcattatcatcacggctgcccttcttcaaaaaccttacatacaaaatatacagcattgccaaaatcaaaagaagcgtcaagaatcccaggtcattatataacatgccgttttttgagacggttactcctgaaagattgcccgactgcgaactataaatgattatatcactctcatccttgtcaagctctatattaaaagaagctcctgcttttccacttccaagcgtatttccttcagcagatttaaccgtaacctctccgcttcctttaacctcaagctcatattctcctttaggataagtgaggtgcggctcataggataccagttcagaatcgcttgctgcaccggctttttttagttcaaaattcatgctgcggtaaccatagaaattaagcatcaacaaaatgcctataaccaaaacggctgccgccgacactaaccattttgtattaattttatgttccattataattcaccgccctttacctttttatcgctgttatctgacttaaattccttaagtttatcctcagtctgcaccagcttatactcaaaatcctgtttgcttttctgtgctatagtagacaaaattagtcctgaaaaataagactgtatagcagctaacacaacaaatccgcacataaccaaagttggcatttgcggaaccagccccgtctttatataagttataaacaccggtacaaaaaatatcaacgctattataacaagcaagaaggaaaacagtgtaaaaaactgcctgggtttatagtttttatataatctgataattgttttcagaaccttaaaaccatccgaatacgtatttagctttgactcacttccgtcaggcctgtctctgtaatcaataataacattttctactgccatatttttatctacagcatgaatagtcatctcagtttcaatctcaaacccctgcgaaagaaccggaaacgtctttacaaaattatagctaaaagccctataaccagtcataacatcttttatattattcttaaatagcctgttaatacttcctctcaccaaagtgtttccaagattatgaaacggtcttttgttttcagtgaagtaggttgaagataatctgtcccccacaaccatatccgcctttttaaatataactttgtcagccatttccctggcgtattctgccggatatgtatcatcgccgtcagccattatataaacttccgcgtctatctcacgaaacatacggcgtatgacatttccctttccctgcatatattcatgcctgacaactgccccagctttctcagctttttcagccgtattatcacttgagttattgtcataaacatatataactgcctcaggaagaacagatttaaaatcttttacaactttttcaattgttttgctctcattataacatggaataagaactgcgattttatccatttatttgctccttacaattattgtttttttgttactgcataataatcggtctgataaccgcggaacggcttaaaatcatatttagtttcatcaaaatacttcttctctgcggtagtaattatgtacgccgcattttcattttctttaacatcggacggctgaatattgctgtatttatatctttccttatacggcaaatatgtttttccatgattttcattcgtcaagccctggtagtaacgagcgtctatatcatgaaaaaatatagtatacgcctcgctctccttcttagtatcctgcagtctggttgttgatgtaatataatacttgtcaacatcaaaggtctcgacatactcaagagcggcacaaaaatcaccgaagaaattccggtacatatcagttgcccatgttgtaaagtaaactgaaacaaacattataaatatcattgcatagctagccaatactgcccactcagaaaatcttatcttatcaataataaattttattccgagcgctgttaaaatcattaacggatacaacaaaattgcaattctccatgtgcccggaagcgttactagacatcctgcggcacagctgattaatgataccaatataactccgcgggccagcttgttcttttgtataaacaaataaatcagaccaaccacagccagcggtattgaaaaatagtacatagtactaaatccttgaatagaatgagttgaaaaatcacttttctgcaaaacaacgaggttaaataattcctttgcgtttgcccacaactgtttgagaggttcagctgtaaagaacagcaaatctgtttgtctttgtgtttcgtagaatcttggtatcgtaaacaacggagtagatatagtatcccatttaaaaaagttaaccattatacacaaaatattcggccatgcaataaacagatagacagctatagatataagcaattctttaatattgatatattttttaatgagtgcatatattgcaaatgccacaagaaacgtcggaacgatatatattgaaataccataacaatacatagtaagtccgaaaaacaccattgagacatacagccactttttattcttcatacccttgtttaagaaatacagagaaataataaaaaagtgagggaacatataacaatccaatgcccagcggctctgcataaaatgccaggggttcatagcgactataagcgctgtgattgccgccgctttcatgccaaacatgtcctttgctaaaagaaccaaaaaaactgcccccgctatgcttgtcaataacagcggtaagcgtatagtcagctttgaaaaaccaaaaagcttaataatcggagccattatataacccatcattatagactgatgtccgtttttccatgcttcaaaataaaccggaaacctcattccataatgatcggttccataatccgcaattgcttttccgtctatagcagccatcgcctcatcaaaaaataaacctccgggagcctgcccaaatgtatatatcctggttccgactccaacaacaaaagcagcagcaaaaactatgaagtaaatcttgctgttaatattccgttctctttttattgtattctgagaaaatttacaatcatacagccatttacacatactgacaatacatagcaggagtataataatcatagctatattattaatcattttaatattctcagccttcgttaaaaattccaattatattcccctttcctactatggtccataatacttacgcacataattgcgcaaataaaagatattcaatactatcggtcttgaccgcataaaataccataaatctatacgacaatagactgttatctgtctttcaattttccttgagataattttttattatttaccgaattcccgtccgaacatttcttcactttttcacagaacaaattcatatattttgaaagccaatcacttatcaaatccaaaaatttattaatatgtaaaagtctaaacagctgaatcctcacaaggtctgccgctaaacataagacaaatacaatcagagaattcagcagaactcccaataccataaggtagagcggcttctgtgacaactgcataagcttaccccaaaacggaagctggaacataaggggatttacatgtataatatatactccaaatgctgccggagccaaaaatcttatcacctttttaaatttatcattatttatatttaaattagcaaaaaacaaaaccaaaaacataccggaaagaagaatgaatatagaattatactgtaaaaatacctcatcattcttaaaaccaccgtttaattttgtatgatattcagaaataaattttccgccccatgccatcacagcggttaaaacatataaaaccaaataccaatacttatttctgattagtttttctatttttatcttttttaacgctgctcctataacatacagaaatattatccatgtggcgctgtatcccttttctaatttaaatagatccacttttgcaaaatacggcaatgctatataaacaaatatgacagatataattaccgcataggcctgttttatcgttatatccctcattcctttattaataaaaggaataaagaaaaacagtgcaaagtaagcagtgaagtaccaataagtgttatgtataacaggcgttaaagccgtataatatggattgcttcccaacaaggctttgtttgtcagcaaatccggcttaagatatataaaaaacacggtaaatatcaaacaataaaacacaacttgaagccaaataggtacaattcttctgtatttaaattttgaatccacaccgacgtatcccgatattaacgcaaagcaatttaccgcgcagtaagtcagagcctcaatcaaaaagcccacctcataatgtatattaaaaggcgaaacccccactagagcccctctgctaagcgaatgaagaactactataagaaacatagaaaccaatctaagtaaatcaataccatagtttcttttatctaatctaatattatccgacgcattgtcaaacataagacgcctccaacttttattttacccctgttattttttctattccataatatttctccatccaggcatttacccaaagcgttgggctgtcgcctgcatataaagccccgttatatgggtcatacttactatccgacggagtcacaagcggtatctctacctcattctcgcccttctcaaccgcctgttcaattgcttccagtccgggttttatttggtcatatgtagatttaactgcagaaaattccttattaaaagaaattaaaaatactatagtaaatactgcggttaacccccattttgaagcagtgataatatatggctttacatctgaaaatttaatttctgaatacagccagcctgcaataacaataagaagaacaatagctgtaaaccatgttctttctggtctcattgccgcaaacgccaaaacagatatcatagcggccgatcccacaaagtatatcagagggacaagccagtttatccccagttttgtatgtctcgacttatcaagcaaggctaaaattaaaaccactgcaataataacaaacagccaaaaagcgagtgtttccgtttttacaataacgtctttaaaccttatcagtatttctgcaaaggacgcttttgagtcaatgcggtaattccccggagccgccaaaagaagtacaacaccgcatacagccgttattactccaatccaagaccattttggtattttaaacccttttatcttatagaacaagataaacaaggtgcagataagcactacacctccgccggtattttcatttgtacaaccggcaaatataccgaacaatcccattaatacagcgttcttccagctatctttaacagaatcagcaccatttgccgcatacattctatacggcagcataaatgaaagcattatagccgcgcaccagagataatttgccgcgcctgaagcccacattacagataagccgaactgcggcaggaaaaaccacatcccaatatatacaagtaccagtaaagataagtttgactttttcccataaaccgaatgtttataaatgagaaaacctaaactcacatagaccaatgaattaaaaatcctaaaaaacagttttccaaacggcattaccatctgcaaaagaccatgcgcaacaacacgtccgttacaaagcttccaatgattaatcattgaaataattacatcccaaagacttgaaatcttttttgtcgttggcagaggattcccgggggtatcgtatataaatctatatctaaagtcatcgaatgtataatccacatgcaaattgattataagcagaataacaaatgcggctatcataataaatgcacctgcaaccttaactttgttcttctttataaactcaacaactttatccataatatttctccccgttcaaaatatttgctatctgggcaccacagcacagaaattcccaaactgaataatgttatattttgtgctgtcaaaataatttacatcactttttaatatgacatatgccacatcctcattttgtgaacgggcaaccacatccgaactcatgctaacataagcgaatctctgtctatatggcagcagatcttttccgtgatcatcgtttttcttaccctgaaaatattcggcgtcagtctcatcatagaatagggttaatatttcactcacttgtgaatatcctttgccttgtgcgtcagcggttacataaatcttttcagtatccgcttgctccgccgctgacaaagcatccccaaatccataataaaactgatattttatagaatcagcataggttgtaaaatatgtacttaccagcattattccaaggatagcatatacacacagagtgctccactttgtatactttatttcttttattgtgaaatatacgcccaaaacaatgaacatcattaacccataatatactatattaattctgttaacatttactccattggtaagcagtcctgcccaaacacctgttaagagtgcaaaaagtaccaaacctttggcaccgtcagtcttatttcggaaaagttcaacaaatccagcaaatacaaatggcatactgcacagaaacattgttccaaaacctacaatatcattccacggcaaatcctttttctgatacaacgtagtattcatcagggatttaacatttagaatcagctgtttaaaaggttcatccgaaaacagcagaatgtcatttgaacgcacgctcccggaaaaatactgcatggtaacaaacggaagctttatagtgtcccacttcataaagtttataaacatggtaagcaaaaacggccaggcaataataagatacacgccggcagaaattaaagcgtctttccagtttatacgttttctaataagataataaatacatacggcaagcaaaaatacgggaatagtgtaaatagttattccataacagtacatacaaagaccgaaaaatatcatagatataaaagtatatctgcgcctttttgtcagacccttatttaaaaaatacaatcctcccataaaaaaatggggtaaaaggttacaatcaagcgcccaacggctctgaataaaatgccaaggatttatagcaacaaaaacagccgcaatcagtccggcacccttgccaaaaacatcacgaataaaaagataaaagaacacgccgccggcaatactcataatgagctgaggcagacgggctgttataggattcagtccaaaaaacttaacgaaaattgctatcaaatatgaaagcaatgaactcatttgaccatatccccaagcatacaagtgagctggaagccatgtgccaaacctatcagttccataatcagcaatagccttgccgtcaactgcggccatagcgccgtcctgattaaaaccgccgggcacgctgccaaattgccaaactcttataccaattcctattattacaacagccgctataattaaatagtatatcttgtcgttcatagagaattcagaaggactaaaacacttcactccaccacctttattgggtagtatcctcgcattatatttgcgaactgcatagtttataagtgccagcgcaacagtggcaaatatgacccaaaaaaatatattatttaatatagacaacgtattttccatcgttttactccccgtaaattatttgtttatatcctttttgccaatgacccggcttataatatacctgggtctgcccttaacctcttcataaatctttttaatatatattccgattacacctagacccagcagtattaccgcgccaataaacaaaagaagcagtattaccgttgtaaatccactctgagctttcccgagcacatac

SEQ ID NO: 75 - DNA, 2833895 bp, Monoglobus pectinilyticus (residues 1,416,949-2,833,895 of 2,833,895)
  source 1..2833895: mol_type = genomic DNA
atatataatgtttgtattcccattacaaccgcaaaaacaaagaaaatgattccgaaaatagaagctgcatacagcggagccgccgtataagaagtcaccgcgtctacagcaagtcctatcagacgtttaaacgaccattttgactcaccctctatcctgtcagccacttcaaattcgtattgataacgcttaaagcctacccaagaagacattcctcggaaaaacgtttgtttctccggcatctctttccatgcgtctatagccgcgcggtccagcagacgaaaatccgagctgtttctgaggtcaatattagatgattttttcagaaaagaataaaaggttccggcacataatttgtacataaggctttctttctgacgcttctttttaacaccttctacgacctcatacccttcctcccacaatttatacatatccggtataacctcaggaggaaactgcatatcggagtcaaggcaaatggcacaatcgcctgttgccgcgtccagtccggcacataatgcgctttcttttccaaaatttcttgaaaacgctataccgataataccttcatatttatctactatatccgaaatttcttcccaagcgttattccgggaaccatcatcaacaagtattatttcatatttgatttcagcatttgacaaaacatccataactctggtgatgtttggctctatatttatctcattataaatcggtattactacagacaaaaccttaccgcctgaattcatccgatgcacccctcaatatgtaaaatttgtaatatattttagtgaagctggcgcttgtctataacccttacagatttgccttcacttcttgcaatagtctttggctctaccagctttatattagcctttattccgagaacagaaagtatttctgcactaacttttttggaaagcgcctctaaacttttaatctcatcagttaagtctttatttgaaacctcaaccaaaacatccagcatatctttattatttattctatcaacaataatctgataatgaggcgctacgccatcggttttcatcagcacttcctcaatttgggatggaaacacatttacacctctaatgattaacatgtcgtcgcttctgcccatgggctttgacatacgagcaaaagttctgccgcatctgcacattcctttattaatagtggcaatatccctagtacggtatctaattaaaggcaaagcctcttttgtaatacacgtaaacactatctcacccatactgccgtcaggcacaacctcgcccgtctcagggtctataacctctacaataaagtgatcctcatttatgtgcattccggactgatctgcacattcatagccgacgccgggccccattatctcacttaaaccataaatatcataagcatttattcccagcttttcttgtatttcctgacgaatttcttcagtccatggttcggctccgaacgcgccgccttgaagcttaatgtcatctttagtaaatcccatatccactaaagtctcactcagcgagagagcatatgaaggtgtacagcataaaaatgtcgaaccaaaatccttcattatatttatttgacgcttagaatttccgcttgaagttggaatagcaactgctcctatctttctagctccatagtgcgccccaaatccaccggtaaacagtccaaaaccgtacgatgtctgaacaaccgagttcttatcgacacccatagcagaaagagctctggcggctatttccgcccatatatctacatccttctcagttagtccaaccacggtctgctttccagtggttcccgaagaagcatggatttctgtaacctgctccatcggcacagcaaacataccatatggataattatcacgaaggtcctgcttaactgtaaaaggcaattttgataaatcatccaaagtcttaatatcatcaggcttaattccggccttatccattttttctctataaggcttaacattttcatatacacgattgactgtttcctgaagtctcttaagctgcaattcctctagcttctctctcggcattgtttcaatatctttattccatattgccatttctatatctccttaaaattgtaatcaaacttgacatacgtctcctatcttatctattttacatattttaaagcaatttgtcaataattatatactataagcactcttttgtttgcaaaaagtaatataattttatataaaaataaatatatatgttatttattttcactattatatattgatataagaaaattattgttacttgctttcagtaatcaattaaatttttcagctacgtagtccctgtactcatataatttatacaacaatctataagctgttattttgatacaaacctttattttatctccaaattttatcataaataaaatcttcattttattttaatgttagttatctattttttaattattgggctcatgcatactactaattgaatattaataaattagtatatgtacttttagacaatattttagacaatataattgtaaaaacttaatacataaaaaatttaattatttaattgtgtgacgtaatataaaggttttacatggattattaaaacaataagaatagttttaatagtaagaaacagtaaaaagaaatcaaacgacaacttattaaaataattcttaattcatattttctattattttttctatatttcaattgctttattttaatatacttaatatttctatacactttctatattatattacatctgtatttgcaaaggttatgctttagctttcattatcatctttcattattttttgccaaacctttctgtattataataatcacagctgccaaacctctatattttaccacatagttttatacctttattttataaatttctagacctgatatgaaattatttttatactataaaacgccataaaaaaagaggtttccatataggaaacctctttgaaattcttcttaaataatcagttatactgaattattttgaaaagttataatcatactcccatgttgtataatcaacaacatcagcattcttatcatatgttcttacatatacgaagtcaagcataccaaatgctggagcatcttcaactacgccgccgaaatcgattgtataagaaccgttaccgccatcgttagcaagtactttatctactgtgatatcaccaagtgaagcagtctggaacttagccttaccgtttcttgttgggtcatagagatagtagttagctgtgtagtttgaaagtgatactgactcccaatcattaggatcaagtgagattataccatctacatctgcctgagcaattgtaagtctgttaccgctcttctgaactactgcgccatagtaaacttcttcatcgctgtttgaaccagctgtctttacgaagtttgcattaggaacaccagctgttgtaaagtcatcgccttcataaatcttatctcttactgtaccatcaaatgtcaaataaggaactgctgaagtaattgttccgtttgtaagaccaaacttaaacaatgaaccagctactgtgttctgatcaagatacttacctactgacatatcatctgtgttagcttccttaagttctccatcctggtagtaagttactgacaatactttgcttccgtctactgttgtctgaccaatacttgtgatataagcaagaccagcagaagcaacgataccagtatcagtattatacataacaactacacttgctgtgccgttttcatcaccgttacgatatacaactgagctaaatccatcatttgttccaaggtcagcacctacaccgattgaacagttttcagaaggttcaccagctgctggctgattgtatacgaatgagtcaccagatttaccgatatagaatactaatgtatcatcagctatatcatatttcttagttccgccaactcttaactgctttgtatcttcatcaaatgaagaagcgtttgcagtatcagctttttcaagaactaatgtagaatcatcagttgttgcattaagagcagccattgtgattgacttgatatatccatttgtagcattataagtgattactgtaccagccattgtattaatagcttcagtcatagcgtctacactataatctttatacttaaatgatacactgtcagagttatcacctacaagcttctgaatctcttctgaaggattgtctattgttacagtaccctggaaatcatatgttccaattgtaccatccttatagataatctgaagtgaaggaacgttgtcactgaatccgctagatgtaatctgagcgtcaattacataaccataattgtctgttgtcttagagtttgaatccttgttgtaagcaacaatcttaccatactcatcaatatagaaagttccttctgaaccagcctttaatgttccgttgttgtaatatccttcagccaaatcatagtcaacaccgcttattgtataagctgtaccgtcagcagatgtgtcagaagaagatgtacgtgaaacagaacctgtaattgctgtatttgtgttatctaatactttaatatcatagtaatcgctctgtgcatcgccgttattagcaacgattgaaagaacgtcccaagccttcaaagctgtgtaatcataaggcttaccatcttttgtaaggttgatgtacatatctgtgttagatgaatcaaattcaaccttagatacagaattcatgtgatttctgtcaccaacgctgttcttgaatgtaagaacccctcttgatgaaagctcatcaacaactgcgccaactgctacgtcaacaaagattacatcataacctgatgtgtcatcattatcaagaactgtaactttaccgctgtaagcgctgtctttgtagattaatcctgattcatcgccttcatagcttccgaataagctttcaagtgtgccactgtaagctataccattataaatgatagccggtgaatcagaatagttaactctgttagaagttgtctgaagctttaactttgtagcactcttgtctgtgtcattcttcatgtagctcaggttatttgtgtcagaatcatagctgttgaacttgtcaagtgtaaactcaacttttgaattcttacctgtagcttctgtgatagaaagaattgtatctgtctcattcttgttgtcctgagcataaagtactacgtcataaccgaggtaatcagcagcgtttgtgtcaccggtgtagaatgggtatacagaatcaacttcgtaatcactgtttgtgtcgtttgaaccgaggtagttatcctcaacataaagcttaatctgctgtgtagcatctgtgtcgatctgaacagcagcgtcaagagctgtaacttcgttctctgttactacacccttaagcttgttgataccgagagcctgattcatgagagtctttcttgggctccatgactcgccatcccagataacgtattgagcttctccgccgtatacgtatctctccatcaaaggagtatcaatagcattgtaagtcatctgagcaacctgacctcttgtagcttctgtaccttcagctccgccaacaacgttcttaagaacgctctgtctctgagcagcgaggatataacctgtaggatatccgccgttgttctgagcatatggcttataaccaagtgtttccattaacattttgataacgtcttcgtaaagaaccttatcgtcaggaccaaaagttccatcgccgtaaccattgatgataccctggtttgtagcgctagcgatataacctgatgcccaatatgtagaaggaacatcagtaaatactgtgtctgcctgagctacagcgcctgtctgtccctgaattctagcaacaataactgtgatttcagctcttgtgatagaatcgttaggacggtattccataacgccatcattgttttcgtcgtcgcctgtcaaaatgccaagcttgtttaatgtttcgatcgcttcatagtaattatcgccttctttaacgtcaccaaatgtggcagcgaaagcaactgtgcttaccatcatagcaaaaactgctatcaaagcaatcacttttttgagatttctcatgtctcaaatcctccttaaaatattaaaattttaattttttttacaaaattaatatataaacttcgggaagagacgacagaacgtgtttatcctatcatacttttcctttagcttattacagattataacaccaaatagggcaaattgtcaataagtattttcccttttcatagttttgtaacaaattcaccaaaattaaagttctatttttgtgaacaaagtagcgaattatatataaactgcttaaacagcggatgcggtctgttcggtcttgacttaaactccggatggaattgaacccccacaaaccaaggatggtcgttaacctccacaatctcaaccagtcttccgtcaggagatgttcctgcgatagtgagacccgcgtttttcagtttatccctatagtcattattcatttcatatctatgtctgtgtctctcactgataagctcagctccaccataggcttccttagcatacacactttcatcctgaatcttgcatggataagcgccaagcctcattgtaccgcccatatttgatatttccttctgttccggcattaaatctataaccggatactcagtgttctcatcaagttctgagctgtgggcgcctttcagccccgccatgtttctggcatactctactactgccagctgcattcccaggcaaatacccaaaaatgggactttgttttcacgggcatatctgatagcagaaattttcccttcaatacctctgtctccaaaaccgccgggaaccaaaatcccatcggctttgcccaaaagttcttcagcattgctgtccgttacatcctcagcgtcaacccagtcaatatctatttcagcccccaaatcgaatccgccgtgccttaacgcttcggctacgcttagataagcgtcatggagaccaacgtatttacctactaaagctattttgacttttttgtcaagtcctttaacctttttgattatactgttccactctgtcaaatcaggctcacttgcctcaataccgagacgttcgcaaaccttttcagacaagttttgattttcaagcataatcgggacatcatatattgtgtcacagttaagattctcaaaaacacaatcctttgaaacattacagaacagcgcaattttatctttttgtgattcctcaagcggaacttcactcctgcaaataagcatatccggctggatccctatactgagaagctccttaacactgtgctgtgtaggctttgacttaagttcgcccgacgttttgaggtacggcaccaacgtaacatgtatatacataacgttgtttctgccgacatcaccggcaacctgcctgatagcctccaaaaacggctgactttcaatatcgcctaccgtgccgcctatctcagtgataaccacatcagaatttccctcattgccgacatcataaatcttttgctttatttcatcggtaatatgcggaataacctgaactgttcctccaagatacgcgccctgtctttcctttgttatcacggaatgatagaccttaccggtagttatattgctgtttttagtaaggctctcatcgataaatctctcatagtgccccaaatcaaggtctgtttcagcgccgtcgtctgtgacaaacacttctccgtgctgatatgggctcatggttccagggtctatgttgatgtaaggatcaaatttctgtatggtaaccctaagccctcttgtctttagtagacgaccaagtgaggccgctgtgatacccttacctattcccgataccactccgcctgtaacaaaaatatacttaacagccaccacatttcccccttatcaattctataataaataaaaaatgcgccgtgacacttaatgcaaaaagctttggatgtacaaaaatcacatctctatcacagcacacaccaatgaataatattttaataccagatgacaaatatgtcaagtataaaatcgaatttgtttttaaaatgtaacctttgtaactttgtgtaacaaaaaagtgtttgcttttttacataatgtgtgctatactcattgcatcgggatataaatgcggcgattctgccgtttacattatatatgacgacactagctttgattgggttcccaacagagactggaaattttatctaaaaagtaaatttatttaataattttaatggatttatttttgtgtatggagtttatggataaatttttacattttttctctgttatggataccgcatattgggtatcctatttttttacatacaatggtatgtgcaatataaaataataagtgcatatatataatgaagaaactcatgccaaattataaaggagaattaaaatgtctaagcaaacaactaacaaacctataacaactaaaataataaaaaatatgaagggcgctgaaaaaatatctatgcttaccgcctatgattattctatggcaaaacttgtagacagagccggaatagatatgatactcgtcggcgattccctcggcaacgtaatgctcggatttgataacaccacccatgttacaatgtcggatatgcttcaccacacaaaggctgtggctcgcggagccgaacgctgtatggtagtagccgatatgccgtttctttcatgccacttaggagtttatgaggcggtgaaaaacgccggcgcattaatttcagaaggtaacgccggcgccgttaagcttgagggcggaaccgaagtatgcgaaataataaaggcgataacagatgccggaatccccgtagtaggacaccttggactgactccgcagagcgtaaatcaactgggcggattcggtgttcaggcaaaaacacaggacgcagctgacaaactgcttgaggatgccaaagcagtggaagccgcaggagctttctgcctggtgcttgaatgtataccggccgaactggcgaaaaaagttactgactctttgtctatacccactataggtattggagccggatctgactgcgacggacaagttcttgttctgcacgatatgcttggaatgtttgacgactatattccatcatttgttaaacaatttgctcaagtaggaaaagagattacggcgggagttacgtcctatatatcagaagttaaaaacggaagttttcctgtttcaaaaaaataacaaatttaattaatgcttgatttacagaaaggatgtttagacttgcagattattaaaaccccaaaagaactgaacgattgggctaaaaaaaataaagtgaatggtaaaacgataggtcttgttccgacaatgggctatcttcatgaaggtcataaatcacttattcaaaaaagctcgtctcaaaatgacttaaccgttgtaagcgtttttgtaaaccctgctcaatttggtgaaaatgaagatttagactcctatccgcgtgacttagaacgcgacaaaacagcggcggaggaagccggagctgatattatatttcatccaagtgcggcggatatgtatcctgaaagttatggaacatatgtgagtgttgacagtgatattacaaaaatactctgcggcaaaagccgccctatacactttagaggagtaacaactgtggtttccaaactctttaatatatctatggctgaccgtgcatattttggtcaaaaagacgcacagcagcttgcggttatactcagaatggtcagtgaccttaatatgaacatagaaattgttccgtgccccatagtccgtgaaagcgacggtttggctatgagctcaagaaacacatatctttcgtctgaagaacgtaaacaagctctggtactcagcaaatcacttaagaaagccgatgaagcaatacacaacggtgaaaaagatttgaaaaccataaaggacagcattcgcaaaattatttccgaggcgccgctagctgatatcgaatatatagaggcctacacttttccgggtttgtccgaatgcggttctattctttcagaaaagacattaatcgcactggcagtcagattcggcaacacaagactgattgacaatattatcgcagatccaaaataaaaataacttttaggaggtgacaatatgtttatagaagttatgaattcaaaaattcacagggcaaaagttacggatgcaaaccttaactacataggttctgttactatagacgaagactggatggatgaggtggggattcttaccaaccagcaagttcatatcgttaatgttacaaacggcgaacggcttgtgacatatgctattccgggagaaagaggaagcggaaccgtctgtctaaacggggctgccgcacacaaagcttctgttggcgacacagtaatcattatagcttatgcttctatggattatgaagaagcaaaacagcataaaccgaacgtaaaatttattccgggaagcatacctgaataaacttttaaccagctataaaaataattttaaatgtgacgataatgcgcttaaaaattgactatatctatattacaaataactagcccgttataacacaaatgccgccggctccaatcagagctcggcggcatttattatgttattctatacactaccggcagttaaaataatactaaatttttattctgcactattatttgtgggcagcttctgccaacactttcgttaatgctcccactttttctactttttcatcatttatactgccttcggcaatctgatttacaattgcgcttcctactataagaccgtcacaataatgttttaaaccttcaatatgcttaggcttagatattccgaatcctaaacacttgggcatatccgtaaacttattaagcatagagaaaactccgtcaaaatcagtaccaaatccatctctcatacccgtaacacccattgatgatacgcagtataaaaagcctttggctctttgacagatttttttcgctctctcctcagatgaagtcggcgtaatcattgaaatctggtaaacattatattttacagtatagtcatatatctctccgctctcttcaaacgggaggtcagggattataactgcgtctacgccgctttcagcgcaatttttgaaaaaatcttctattccataactcagcagagaattaaaatacatcaaaaataccagcggtatttcagtttcttgtcttagttctgagaccgctttaaatattttgtctaaatttatctcgtttttaagggctctgacattcgccgcctgaataactggaccctccgccattggatctgaaaacggaacccctatctcaataaggtcggctccctctctctccatttcaagcaccagcttttttgaggtctcaatatcagggtctccaaaagtaataaaggtgattagcgcctttttattttcatctctcagcagactgaattttttatctattctattttcattagtcatttatatcaacccccataaatctggcaacggattttacatccttatcgccgcgtcctgatatagtaattacaacaatatcatccttactcatgcccggaatcagcttcatcgcctgtgccaccgcatgagagctttcaatagccggaattatcccctctgtccttgtcagataacagaacgcatcgacagcttctttatcggttatcggataatattcagctctgccaagttcttttagatatgcgtgttcaggtcctattccaggataatccaatccggctgatatagaatatacttccataattcctccgctgttatcctgtaaaaacaacgacttcattccatgcagaaccccaacatcacctttggcaattgtcgccgcgtggcgttctgtatccactccgtcaccggccgcttctgcgcctatcagacgaacctcgttgtcttcgataaaatcaaaaaatgttcctattgcgttgcttccgcctccgacacatgccactaccgcactgggaagccggccttccttttccaaaatctgctcttttatctctctgcctataacgctctgaaaatctctgactatcataggatacggatgaggtcctaccgcagaaccaagcacataaaaagtatcagccgcctctgccgcccacgctctcatagcctcgttgcaggcgtctttcagcgtcatggttcctgaagtaaccgaacgcactgtcgccccaagcagtctcattctgaaaacgttaagctcctggcgcttcatatcttcctcgcccatatagaccgtgcattccataccgaacaatgccgcggcagtggcagcggccactccgtgctgtccggcgcctgtctcagcgataatctttttctttcccatacgcttggcaagcagagtctgccctaaaacattattgattttatgcgcccctgtatggttcaaatcctcgcgctttaagtaaaccttcgcgccgcccaaatcctttgtcattctttcggcataataaagcctggacggacgattggcatactctctaaaataaaactccagttccttaataaattcagggtcatttttcgccttgttatactctgcttccagctcgtttaaggcgaacataagagtttcaggagcatattgaccgccgaattctccaaacctgccgttttcaactacattattcattataaatccctcatatctaattatatattttcagttccgcacggaactttatcatctgttcattttactgcaagacctgaccctatttaccaagtcaattattttatctctgtctttcagcccgtcagtttccgctccgctgctgaggtcaaccgcgtaaggagcataatctgtaactgtactcacaatattttcagaagttattcctccggccaatatagttttttcactgtctatgttttcaagaagtctgaaatcaaaactctttccaaaacctccgtagccttcaacatatgcgtcaaacacaaatctgtctgccgaagctgacttgtttacatctgcaaggttcaggttctccttaactcttacggctttccatatctccgatatttcagcgcacttgtctctcagggcagttatatactcactgtcctcatccccgtgcagctgaacaatatcaagttggacaatccgaacaatatcacaaacctgttcaactgacagattaacaaatacacctacagtttttattgccggttttagattccgtctcagttcagctgctttttcaggtgaaacataccgcctgctttttggataaaaaacaaatcccacaaaatcaggctccgcttcattaaccgcttcaatatcctcgggcctgaaaagaccgcagattttaatctttgtttccatatatcccacctcagaattttataatccgcgcattgagctgactgctcctgcaatatcctgccgccgcataaagctctcgccaatcagaaccgcatcgatacccaaagtctcaagatagcgcaaatccgtgttattttttataccactctcagaaaccactgccttttcagaacggttttccaaacctgctgttaatctttctgtagtatgcaaatcttcttcaaaggttttaaggttacgattatttattccaactatctttgcgcccaaattgttaacccttttcatttcttctatatcgtgtacttctgtaaggcagtcaagccccaagctttcagctatactcataaattctttaagagtagtatcgtccaatattgcggctatcagtaaaacagcgtcagctccgagcatatatgcctcatatatttgatactcgtcaataataaaatcttttcttagaagcggtatattagaaatctttcttatatcagagataaactcaggtctgccgagaaagaaatcagtctcagtgagcacggacatagcctgaacatcagagttcagatatgcctcggctacggcaatatgattcaagtcaggccttatcagtccctttgaaggagacgccttttttacctcggcaattattgatatcttttcataatccttgagcgcattataaaaactaataacctttctgtttccgaaagagtgttcaacattacttctcaaagtcttatagcttaccttctgctttgtattttcaagatatattttctttttagttacaatcttttcaagtatatccataataatctccaaattaattaaagctgtttgtcatatccctaagctgattcaatttctccagcgcctttccgcagtctattgcctcttctgccagcctgacgcccttttcgatcgtatcagcgattccggttgtataaatagcagctccagcattgagaacaactatgtcccttctcgcacccttttcgccatttaatatatcaagagttattttaacattttcttcaaccgtaccgccttttatctcattttcaggcgcgacgctgagccccgcgtcctcaggcgaaagataataatcaatcacctttccgtctttgacctcggatattttcgttttacctataatagacagctcatccatgccgttatcaatcccgcaaacagccatacctgccgtaacaccaagatttttcatagcgtttgctatcgggtgcgtcaaatcttcgctaaaaacaccgattacctggtgttttgcattagaaggatttgaaagcggaccgagaatgttaaatattgttctgatcttcaactcgcttcttaccccagaaaccgtcttcatacaagggtgcatagttctcgcaaacataaatcctataccgattttctcaacgcattctttaacctgctccggctgaatcatgatattcacaccaagcccttccaggacatctgcactcccgcacttactcgataccgcacggttgccatgctttgctgtcttagcccctgccccagctataacaaacgcagccgttgttgatatattaaacgtgtttgttccgtcgccgcccgttccaacacagtccacatagtcatcaacgtcaggcgttatgccgacagccttactgttcatcattgctgcgcttccgctaatctcgtctattgtctcccctttcattctgagagccataagatagccgcttatctgcgtcggtgtggctcccccgtccaggacagcgtccatagcgtcttttgcttcttcataactgaggttctcgccctcgctcagcttttttatatatcttgaaatcataaatttcaccccttaaaacgaatcctgcaaatttcattttcaactatatcaaatttatatccttaaaaagttctcaatcattttcggcccgtcaggagtcagaactgattcaggatgaaactgcattccaaacagcggatactccttgtgttccattgccatgaccgctccgtctccgcttaccgccgtgactttcagacactccggaaggcagttcttatcagtaaccagtgaatgatatcttcctacctcagccgtatctccaacaaatccggaaaatatccgggacgacttatcaacaatttttattctgtctgtcttgccatgcatcagacgagacgcatgaacagtttttccgcccatagcttcgccaattgactgatgtcccaagcaaactcctaatatcggcagttccttataaaactctctgattagctcaatacaaattccggcgtcaccgggatatcccggaccgggagatattataattcgctccggtttcatttttcttatttcctgaactgtaatcttatcgtttctgtataccaatatatccggttccagggttcccacacactgaaaaagattataggtgaacgaatcataattatctattatcaaaatcattaaagttcacccgccttttcaatcgcgtcaatcattgccatagccttgttcagcgtttctgtatactctgtctcgggcactgaatcatatactattccggctccggcctgtacataagccctgctgtctttaaacaatgcggttcttatggttatacaggaatcaaggcttcctccgaatccgatatatcctatcgctcctccataaaacccgcgctttctgttttccagctcgtcaattatctccattgccctgacctttggcgcccctgacagtgtgcctgccggaagaacgctctttaatgcgtcaaaccggttcttatcctgtctcagaacaccatcaacgtcagatgtcatatgcatgatatgtgaaaacctctgtatatattttagacgtttaacattaacgctcccaaacttacaaaccttacccaaatcatttctgcccaagtcaaccagcattatatgttcagcattctcttttgggtcggctatcagttcaaactcattgtgtctgtcaagttcttcagtctcaccgcgcggtctggaacctgctatcggactgttctgcacaatcccgttctcaactctcacaagcatctcgggagacgcaccggctatttgacagttgtcaaactttaagtaatacatatacggagacgggtttatcacccttatggctctataagcattaaaagggtcgctgtaattttcaatttcaaacctctgtgacagcaccacctgaaaaatatcaccgttctttatatactctttcgctttttcaacgctattgcaaaactctgatttagtaacattgctttttggtttggaaccaccccgaaaaccgttcttcggctcctttaactcaggaagcggagagttcaattcatttcttatttccatgagcctctctacggctctgtcatatctaaactttaagttgtcgccgggatgaatatttaccatgagcaccagcttcttttttttattatcaaaagctataatctcatccgtaaacataaagtgcatatcaggctgctccaaatcgtcctcaggaacattcggcaaattttccgaaagtctcaccaaatcgtaggagaagcatcctacagcgccgccgctgaattccggcagcccctcaactattggggatttatacttctcagagtattcacttaaaatatcaagcggatttcctctctttacggtctgaaccccgttaaaatcagtcaaaacaactttatcaccataactcttaaaggttaaaaacgggtttctaccaataaatgaatatctattggtcatttcatttccttccaccgactccagcaaaaagcagtatttatcagtttcaagtttcctgaaagccgatatgggggtatccatatcagcgaaaattgacaatgatacaggtatcaggtcatagcccttatcagcatactcttgaacctgttcaaaagcgggataaaacataaaaaaagcctcctcataattttttggattaagagcagacaataatcaagtattcaaattaaataaactccgcgcatgaatgtcgaatcatatcaaagaactgtgcgctttcgggcactatttcagcccactcatctaatctcatctaatataatacctaatctcgtctaatccgaactaaatctgtatgctacattatatacgcctaaataaaatttgtcaatacttttcttgaaaatttattatttgatttataaaataacattccccggcatataatgtgccggggaaataaaaattgttaagcttcctcttcaggagtttcttctaaaatttcctgatacttctgaagaattttatcatttaattcggatcttgtctccgagttaatcggatgtgcaatgtccttatactcaccgtcaggggtctttctgctcggcatagctgtgaacagtctgccttcctggccctcaatgactttaatgtcatgcactacaaacgcatcgtcaaatgtaacggatacgaccgccttcatccttccttctgtatttatctttctgattctgatgtcggtaatttgcattacttctcccatcctttcccggagcttgccccgaatatataaaaatttttaattttgtactaaaattgtttatattcttgaaataatcccaaaaatatagtatactaatcccataaccaattcacgatgaaagaggtaatataaaaaatgaataatttttctatatccgatttgcctaaaggcgcttatattcacatgataggaatcggcggaatcagcatgagcggtatcgctgaaatgctgctgaactttggttacaaggtctcaggcagcgacgctaaaccatcaggtcttacagaccgccttaaacaaaacggcgctgaaatatttatcggtcaatccgctgataatataaaaaatcctgacgccgtgtgctacactgcggctatatctccggataatccggaacttgtcaaagccaaaactttaggtattccggttgttgagagagcggttttcctaggcgctctgctcgaaaaatataaatatcctattgcggtagccggaactcacggcaagactactacctcgtctatgctctctctcgtgctgcttgccgcacacaaagaccctacaatattaatcggcggtgaactcagtcaaatcggcggtaattatcatataggcggaaatgaatatcttccgtttgaagcgtgcgaatacgttgaaagcttcctgcattttaaaccgtttgtctccattatcacaaatatagaagaagaccacctggactattttaaagaccttaatcatattataacatctttcgtgaaatttgcaagtcttacaaatgataacggctgcaatattgtatgtattgacgaaaatactacccaatctattgtgcaaaatgtcaaaaaaaaggctgttacttacgccttaaataacaaaaacgctgattatactgctgaaaatataactttagaaaagaatggttgtcctacctttgatatattcaataaggatagaaaagtgttaagcgtcagccttaatgttgccggagaccacaatatatgcaacgccttaggcgtaacggcggcatgtgaatttttaggcatagaacccgaatatataaagagcggtctcgaagagttcaggggcgcaaaacggagatttgaccgtttgggaaaaaccgaaacgggagttgatgttgtggatgattatgcacaccatccgacagaaataaaaacaactcttgaaacagctaaaaaaatgggatacaacaatgtttgggtggcttttcagccccacacttatacccgtacagctgcgtttttggaacaattcgcttctgcacttaaaacggctgacagagtaatgataacggatatatatccggccagagaaaagtatgacggaacaatgcacgcatgcgatttggcacggcttataccgggtgtggtctatatgaacgatatggacgcaatgaaacggtatatactttcaaacgccaagcccggagatttagttataacaatgggagccggaaacatctgcgacctcggatactcgcttacacaaaaataggaggacattatatgggcaggaaaaaatatatatcgctgaatcagacaaaagacattgttgtctatcgtgaagcaaaatattccgatattcccgaactgtgcggaatcgtaagcgaagcatttgatttcggttcgtttctggacaacgaaaaagacctgtacagcatgacaaaatgttttttggggcaatattttgttatttcttctttctgtcaggttgctgttttaaacgggaaaattgtcggggttatttttggtcttgccaaaactcaaaattggcctcttctgcactttggcgcaaagattaaacttgcgccgtgcaaccttggatttgttttaaaatcaatcctaaaacctaaatactaccgctcatttataggacagaaggagctttacgattcactggagcctcaaatcagcggactggacggtgacataaccctgttcgcagtcagcagtgaagcgcgcggtcacggtatagggaaaaatttaatcgaacagctctacagccatttcagaaggcacaaagttaagaggatttatgttcttaccgacaatatgtgcacctatgagttttatgaaaaacaaggttttgaaaggacaagaaccgggagtattgaaataatacgaaacaataagccttttgtattggaggcataccgttatgaaaaggacttggaatattgataaaaaactataaaaataaccgggacggggtatactatgaataaggaattgttaatcgacggaatcaaaaaactcggtatggaaacaacggaggaacagattgaacgcttttcaaaatactcagaacttctgaaggaatggaataacaaaattaatcttactgccatcacagacgacgacggtatatcggtcaagcactttcttgattctattctgcctcttgcacatattgaaataaaaaccggggcaaatattgcagacgtcggcacaggcgccggctttccggggctgcctataaaaattatacgcgacgatattaatctgaccttgattgattccttaaataaaagaattaattttctcactcttgtctcaagcgaactcaatttgtcaaatactgtatgcgttcacggacgagctgaggacttatcgagaaaacccgagtacagggaaaaatttgattatgtaatttcaagagccgtggctaatatgacagccctatcagaatactgtctgccctatatcaaacccggcggaatgtttatcgcactgaaagctgaaggcgcagaacaggaagttgactcagccagagcaatgataggcaatttaggcggcaggattgacaaaataataaaagcgcctttgcccaattctgatatagtcagaagtctgatagttataaaaaaagttaaaccaacccccaaatctttccccagaacatcaaagaaaataaaacagcaaagtaaacctgttctataatttttatttaaacaatatttttataaaaaaactattgacaataaacagctggttatgctattataatatagctgtttacgtggtccggtagttcagttggttagaatgccagcctgtcacgctggaggtcgtgggttcaaaccccatccggatcgccaatgctgccttagctcagttggcagagcacttccttggtaaggaagaggtcggcggttcgactccgctaggtagctccagactaaaagcctatggaaacattagtttcagggcttttttattttataataaatataaaacttgatattttattataatttatattttattaaaatatcactttgtaaatatgtttttaatctgtgaatatagcatgtattttataaagatttagccaatttaaatttttaaatatatgacgctattatattgaatattttttatataaaaacaattattatgtaatattatcctgagctttttaatttattaattaaaatttcttaaatcaaattactatctgttggttaaatcattttttcaatcgctgacatacttttaaataaaacctacactattagtcaatatatatattttatttaaaattacagcatacaacctgtacgaaactatttacacgactgcataataaaatattcgtcaactaatcctattttttgacgaatataatatatcaatttatctataaatgagaaaataaaaacgccggaaaatttcggcgttttcacatctttaatttaatatgccttttatctcaatagtttttttcgaagcgttcccccatctatccataagtaaaatgttatacttgccatttttcgaaaaacgaatataatcattttttatctgtttttcacggacaaccgtatctatattgtcaaaaatgcttgccgcctcatattctatttcgggaaaatatccttttattggctcctcctcagtgtatggttctatatatctatacgcagatacacaggaatcattaatgacatacttaactgaggcaaacggatttaaaactgactcaatattaactctacacgtatttctgaattcaggtatttcataatcaccatcacaatactctgtataataagactcgatctttggcctggctatacattcaacctttaccatctgaaaaatatccgtaccattctcggttattgcgtgaaatacatatttaccgttctgatatatactgaaaacacattgttcctgagcgtcaacaattttagcattgaacatattaatattatcattatataattctgagacctctttgtcaggattaaagtaatttaatttcacataatccatgacttttacacctacattaggttttagagaaagcattgccggataaaaatctaaatcatatttttcatctatattcttagatatacgttctggtttgtccagtttataatttatacttccattaaaattatatcttaaatcatattcgtatgtttcataaacaggttccatagaattcaaattattccatgtaaatacctttattaaattacctccatttctttcaagagaaatttgtctattcccaagttcaatattgcataaactacaatcttttccatcgtcaaaatatatcgccgctatgatttcacattgttcacctaaatccgtaagataatcaatataataagtgtctccgtcatttctaatgtcaatcttaggaattgtatctgttggaacgaatggaattgtatattttcgtgcatacagttctacacatgaaccttttataccatacagaatttttccatatatccaattataattcgaatatgtatctatagtaatagcatcatcttcaataacatcgactgtatcaggaaagacaatttcaataagtctatttccacagaatgcatttttacaaacagaaatcgttccgctgggaatttcatagcgacccatacggccggaaggatacgaaatcaatttagtttgtgaactatcataaagtaccccgtttacatccttataaatttcgttgccttcagctatttcataatcaacaaaattttcacccttaatcctaattccctgattatcatccttgatggactttggaacatatagtttagttatctgcctgcagaatgatagagcgtcttgactaatactgctggttccctccgctattcgcacttcacctcttttggcttgcggacacaaaatcaattcgcttttttctcctttagtatataacaaaccatcatcagagtaaaatacaggattatccgcatttacaattactttttcaagttctgaagttaagcatccgggaaatatttcaatcaaactgccgggaagctccagactctttaaaacatcacattgaccaaatgcatttaaagataacccctttaacccttccgaaaatataattgatctaagattacagcaatatccaaaagaattttccggcaaaaattccatactcttaggaatagttaccccctcaagactgcaaacattaaacgcattttccctgaaaccggttactccttcaggaattatgacctccccgatcttgttttcgggacaaataattagttcgtttaaatccttgttatacaaaattccatcaacagacctgaaattattattattctcattgacttttatttcagtcagatacggactcattgaatacattccaatcatttcgacactgcccggaatatcaatactgctaatattagattttaaaaatgctgaatccacaatttcagtaacgccttcaggtatagaataatgttcaagtgtcaatccgcagaaaattaatttcgacttattcgccgaaaacaaaattccatcctgactaatatattccacattgcctccagaaacatttactttttcaagaagttgaaaatcatgaaatacctcaggatttatatatgtaacggtatcgggtatattaatctcgactgtgctcggaattgaccccggcgcaactaaaccttctatacctgtgactgcataaccgcccaattgttccgggatatttaatattttatcatcggtataaggttcccaattatacaagagaataacagcgccaaaatccctcacttcatattcatagtttttatcacttagctgctcttcataaccaattgaaaataccggaacactcattgtcaaaacagatatcacaagcaatatcaataaacacttcttcatatataatcacctcaaattatttaccaggtatagtaattatactccgccttcatattattatcaaacaaacttaatttattacctgcagtagatctaactttatctgtaacaatcaatttataataattattaggataaaaaccttctatcccatttgtagatattggttttacactcactgctttctgagtcggcttatcatatatttgtaactggtcagctcttttaccattttgctctacgtacaaattatctatatttactgtagtctcatcaaccttattattaaattccaatcttaatgcatttacattttttgaatcaattagattgcactctatacctaatgttgcagatttttgttgattatacaaaatgtcagcattgacaatttgccctgtgcactcctcaacttgaaaactattgaaatttgtttttcctctatttgaagtaaccttcagatctaaagttacttctttttcatcattttttagatatgacctgcatttttgaattaaaggcgttaaatcaaacgccacctgtgccgaggatgttgattttgtattgccgttaaaatcaaccgccggaagctgacctccatattcttgagttaaagaacttgatctagcattataaaatgcacacttgtttgtgctgacatattcattataatttaatggactggttacccctctcttcactgtgattgcaagtctgtcatttgtttcaagctcggctattccaatggccaacggcttataatatgcagtaggaatcacagtacaataaccttcaattggtttatagcttatcgtgtatttaacattattttgtattaccatatgactgtataacataataaccagtttcattaggtacaaattttatacaatctatatcatttaaaaagttgatatcaccaactatttgccttccaatgccaacatttgtcgctttatcattgtcatttccgaaaaaatcctgtttatcatttgagagaataatgacaggtatagcaggctgcatatctatacctccgcccatacctaagattgaaattttggaattgtattggcttaaatcaaattgactcagtgcacaggtatttgaaaactctcttgtctctcccggttctatagttaattcacaactatcataaaacgtcaacaaagatggaacttttttaagaacataaaaaaagcaatttaacggtatactcgacgatctattattagttatactgacatcaacttttacatcgctgccttgttttaatacattttcacaataaactccgttacatgataatgttacatcaacatcgatatcatcaattgtcgaaattgatgataactctgcctcagtctcagataaaaatctagttgtatctaaaacatccatgttttctgttaactctattgagggaagcttggattcctgtagttcactgtcagataccaacggttgcatattatttttaatcgtctttgaaaggctaagcggcatcatactgccatatcttatatcatttccttcacaaacaaatatcttaactttataatcatttacatttgcaggcacatataattgtggtaatagactccctatttcccctgaagcaatttccaaatgcacactagaatagtcaacaagtttatcattaccgtcatataatgcagttaataccattacattctgagttttctcctctgaatcattttgaattgtagcttttacaccatatgacgaatcaccttttagtatacttggcgcttgaatggaaagcaatgtaggtaccgcaatattattcggcggttctggacaaatttgggtaatgtcagactcatgacctatattaaaaaacgaactttgtatttcaggctccccttcaatagtagcaaatacttgatatgtcccattcatatttccctttaaaggtatggataatgaataatatccaaccttattacttgtcacttgctctaaaacttctattccattactgggatttagaacccttataaatacttgtttaccaccctgtccggttgtatatccatttatagataaagtattctctttaatcgaagtattaatattattattcatattagttatactcatatttacaggaacttcgcttataattccaagctgaccaaaatcatttttgccaaacgaccataattgaccatctttatcaagtacaattgaaaatgccccaccacctgtagcttgtataacattattaaattctccgaccttaaccggtgttttactggttccattattaccatttccaagttgtccgtccctgccttccccccacgcatacactgtcccattattaagtactgccatgctgtgggcatatgcggtaccgaccgattctacgttgtttatactttgtatggcggtaggaatatttctgttatttttatcaccaagtcctagttgaccaatagaattctttccccacgagcacactttattatcaacccctaaggctaaaatatgttctgaatctgttgatatctgtttaaaatcgcccgccaccaaatgcggttccgaagctctaatatcagcatcatttcccagttgcccatagtcgtttgctccccacgagactacactaccattagatatcaccgccataaatttatcaccacacgacaccttttctacagcatcaattaccattacttcagctggtgttccaggtaaatattctcctcgctcgccaagctttccgtcagttgaatttccccatgtccatattttagacgaaccatcatattctcttattgctgcactgaatccagttccggctgatatatcggtaatatgatctattcttgaaatcttagttggtatatataccttacctttaagatcatttccaagttcaccacttgaattattgccccaaccccaaacatatccattttcgtcaagtgccagtgtatgatttttgccttttgctacttttactattttaggtaacccttcaactttttgaggatagtttatatttttattttcctgaccatgacctaaatcataatatgaaccgtctccccatgtgtatacgtttccgttttcatctaaagctaccacactatttctttttgcatcaacttggataaatttacttccaaatggtattttaagtggattgtaactctgttgatttacatacatatcaggatttccgtttggcatatatccccacttatatatataacctaattcatcgctaatccatgtggatagttctcctgcggcaatgctattaaaatcagtgttaattgtttgtggtatatatgaatatatgttttcagtttcatatcctaattgtttataagtattatcaccccatgaatatgtattaccatccttatctattgcaaatgtagaattatatttagtaattattttttcaactccagttataggaactttatgaacataaggagtatcctctgaaatacctaattgcccatatgaattgtctccccatgaataaacatttccctttatgtccaacataaccgtatggttttcaccaacagatatgtctaatatatccttgtcgcgaacttcttcaatttcaccaaatcctacaatatcaaacccataatcaaatccagcttgatatttatcgttttttccgcaaccatataaagttccgtttccttttaaatagaaactattgtcccctcctgcgaatgctttaataatatcaattcctgtttctttcggaacatttataaattctccatttataccaatttgactgtattcatttgacccccacatcatcaatgtattattattagttacagctaaagcatgatttttccctgctgatatactaacaatatcagataaaatttgatgaggaatattactgttttgatttgttccgtctcctaattgtcccttattatttaacccccatgtccatacggttccatctgctcttagtgcaacactaaaataatctcccgctgcaacctctactatatcttcaagtaactgaacacagctaaaatcagaatctagatttgttccgtttccgagctgaccatattcattagagccagatacatataattccccaccagagctaacatataaacaatgatttttccctgcagacattctggttcttgcattgcttaaattattccaatacccaacaattaaagtaggataaaaagtaccattaccaaattgaccatatgaattgtctccccacatccacacattcccataactatcaatggcagctgcatgactatatgacaagataacttttgttatattagacaatgtactaatttgttctggtgacgttttgtttatcctatttcctatacctaattgtccatagtaattatatccaaatgaccacgctgtcccatcatttttaataataattgtataatctccatcagcacctatatcaattacatccgtgaaaacagttagtactgcattgctgtcctctgttatttccggcattcctaattgacctctactatttgttccccaaacatatacctctccttgattagttaaagccacagcatgatttgtaccacacgatacttttataatattagatacattcataactttaacaggtaatgtctgtgtcttttccgagccatcgccaagaatcttatgtacatttgaaccacaagcccatacagttccatcattttttaaaaaaatagtcgatttaggagtacccacaacttgctttacgtttgtaatactgagttgctcaggagaatatactatttccttgtttccgttacctaaactaccataggcattatccccccaggcaaacacactaccgtctgttttaatggcatacttattatagtaactcgcacttacagagtcaatactatataattcatttattctttttgctatattttgattttcaccccaataccatacgtatccacaatcacataccgcaatacaaaaaccatttcctgctgaaatttgctttacatcaaataaaccataaacctgtacgggtatattactttctgtaaaagtcaagttaccaagctgaccataactattattgcctgcagcccagacagaaccattgcttttcaagaaatatgtattttcgccctcaacaacaacttgtttattttccagactgctaaacaactcccagctttccgtagatgttttctgatagtccttaatctcaaaatcatcatccggaattatattgacctcttcttttattgccggaactcctgtaaccgcaccgtaaagactgagcttgtttccatcaatcacactatcctttaaacacgtaagtttatcagatgtattctttagagtctcctttaaagtatcaactccaatactctgagccaatgctgcagcccccgttacaagtgcagccgacatactggttccatccattgtaccatattcgccatttggcaaacaactatatacgtcactaccaacagctgatatatcaacactgttaacaccatagtttgaaaaatatgacattcccaatccttgattcaacgacgctacactaattgtatttggtaagttaaaagctgccgggtatatcggcgtctcatctatatttattttattgtttccagaagcgcatacaaagaataatcctgattgctcaatagattcttttaatgccttattatcatccgtacttccaaaactacagtttactatagttaccccattctcttttgcatattttattgcttttattatatcgctagtgcgtgctttaccattttcaaatacttttaatggaactatctttgcattaggaacaatctttgcaattattccggctatatgtgttccatgcgattgttctaatcccaaatctacattatatacttcattgacatcattaacaaaattccatccctctgttatatgttcggataaatatgggtgatttacatcaattcctgtatctatgactgctactgtcacattatcaccacgacttatctccaaagccatatttaaatctttatctatattatatagtctatcgtactcatttgattctggctcaagtgtttcatctgttatagaagtctctgtaatatttaatgaattataatcgtcactaatactagaatcttcaattatattatctgcagttactgtttgactatcagattcagttattaattctgtgtttgtttttccaaacatatccatcacataatcaggttgtaaatattcaaccacatctcctagttcatttataatattatctataaatgtatcagaatttacactttcatttaactctataacttcgaattcttctgtattgtccgtaagtttgctaacagtaacattttcattagattcagtttttattctgttctctttcattttaagtcttacaagcttctctttatcaatatttttaaaccttcttaaccgttcagactcctccttttctcttttttccattcctttttgatatgcagtttcacttacatttttaagttttgatatatcttttttattagcgtctttatatttaattatatatctatccttattttgcttttctgaatataaaatctcttgttcaacctgcataagctctttttcatcacttggtatattattatctacatcctcggccgtattaaattcattatcaaatgataaggcatcgtattttatcatttgattatttaatgatacactaaaaacatttgcgtttactggcaaaaccgcttgaataaataatactacaacaaccaataaaagcactaaaaacttttcacacgcattagtaaacccctcctaaaaaatatataatataactctatattattagattaatttttccacctcaattctaaataaaatattatatttctataatcactgcaatttatatatagtataaaagctgtattttgtaaaatatttttcaaaaaactctttacacattatatcattgttacacaattagcacaagccaaacgcaaattttcatcaacatccacaactaattgacacaataaacacattgcagcctgaaattatgtatatattcactaaacttgttttatcacaacttattttgttggaaaaataatattgaaaacatttattaaatttataatagaatatattcaatatgctgatagtataattatttataaattgatgtcgaacagtttatcatcttgaaatcttaataaattacatgaatgtagtattagaactaaaaataaataattaaagtcaaatataaaataaacattagtattgatttcttatagccgaagcttattattaaacataaaaatgttttctttaagatttttcaaaacttaaaaaattcacgaaggggattattgcattttattttgtaagttacttttaatgaattcatagctgcatatgtttgaacatatcatttatactaaatagtttattactacttctccacatatcatgcaaatattattggattaacttatataaaacatatgaaaacaaaaataatataaaacatatgaaaacaaaaataatataaaacatatatctaatacatactatttcatctcagactatagcttataataaaaaggaagaggtcggcggttcgactccgctaggtagctccaagagactatacatctgtatagtcttttttcatttattttcctctctttaatatacagaatctaaccgaaacttttatttaaattttttatcataataagatataaataagacaatccatgttttaaattctaaaaacattgcataaaaatttatattcttagtttttatagagttctccggtcatataaaatttattgcttttttcgacccaatatgttataatatataaattaaatcttgtaaagtttatgtgatagatttacattttttataaaaattttaaagataaaaatgtaaaatataaataattatttgagaatcgtcttgaagggaagagtcgaatgttgcaaaaaaatataattcacgaaaatttaaacaatttttgtgttacttggtttaaaaatcgtgatgcaaaaagcgcggcagaatatttatctgatgacatcacctttgtcggcacgggacaaagtgaatatgaaaatggaaaaaccgacatgctaaattatattgagcgtgatatcgaggaaatatctgaaccttttgattatgaacttgtctttatccatgatcaaaagatttctgatgacgtatataaatcatcagccgaaatgatactaaaaaactctctatatgaatggcatctcagagccttttttttggtagttaaggaaaacggccgctggctgattaacaatcttcatttcgccgagccaagcagcagccaacgagagcaagagcattatcctcaaacgctggttatgaaaaatacagcccaaattaggaataaacttttgaacgactctctggcaggcggtatgatgggcggatatttagaagaagggctgcccttttattttgtaaaccgtcaaatgctggactatttgggatatgataatgaaggagattttatagcagatataaacggattgataaccaactgcatgcatcctgacgacaggaaatctataaaaagagagattgataaacaacttaaagaaaataatgaatatgaagttgaatatcgcatgaagaaaaaagacggctcatatatatgggttcacgatttaagccgcactattattaccgagagcggaaagcccggcataatatcagtatgtatagacataactgctcaaaagaaaacacaagatgaaattctgcacatatataacaatattccgggcgccgtcttccgctgccggtttgactcaaaactctccattatagatgcaaatgacggattatatgactttttaggatataccagggaagaatttttagaaatgggcaattgtatggcttcaattctgcaccctgacgacatgaaaaaaattattgatgaactcagtatacaacttagaaacgggaacaccatagacaaagaaaaccgagttatatgtaagggcggaacagtaaaatggatatctgttaaggctcaattatttaaagaagaaaatgaagatagttgtttctattgcgtttttgtagatataaccgaaaagaaacgtcttcaggagcgtgttaaggagttatatgagaacgagttaaaacactttgcggaacaatctccctctgaccgtataattcaagggcgtctgaatgttacccaaaatatcttggaaagctatacatcaacactcaacttagttcatgccaaagtcggagatacctacgataaaattatagagaatttgtcaaagtccgctgttgactccgagtatggagaaaaaattcttacttcgttaaacagagaaactgttcttcaaaattttgcgttaggtaaaagcagctatcattttgactttctcagtcaaggaaatgataactcagttttttggtcaactacaagcttccgcttctgcgttaatcccgaaaatgataatataattgcatttttttatactttggacgttactgagcaaaagcttcaggaacaactgctcaggatgatagcagaaatagattatgatattataacagaaatagacataaataaaaaccaatacaaactcctttcattcaataaagaagatggaaacactttgcctcccagcggtaagtttcaagaggaaatcagaaatatagcagataaatttatggatgagaaatctacgaatgaatacctttcaaaacttgatttcgattatataaaagaacaacttaaaacaaataaaacatattcatttataatagaaatgaaaaacatttatggcaagctccaaaccaaaaggctggaagtattttatatcaataaggaacttggccgggtttgtatggcgcgcaccgatgtaacagatattgtggagaaagaaaaacatcaaaaggaggaactcgcctcagctctggttgctgcagaacaggcgaacgccgccaaaactgattttctatccaggatgagtcatgaaatccgtacacccatgaatgcaataataggtatgagcactattgcggcacaggctatcggaaacgatgaacaggtggcagactgtatttctaaaattggtatctcgtcacgttttctgctctcgcttataaacgatattcttgacatgagcagaatcgaaagcggtaaaatgcttttaaagtctgagaagatacctatagaagaattcttaaacggcataaattcgatatgctactctcaagcagcggccaaaaatgttgaatacgagtgtatagttgatccaatactcgacgactattacatcggcgacgctatgaaacttcaacaggtattaataaatattctcagcaacgctataaagtttacaagcgagaacggtaaggtttctttttctgcttcagttcacagaaaattaaaaaacgacgcagttctgagatttattgtaaatgacaccggtataggaatgagcgataagtttattcctcatatattcgaaccgttttcacaggaatataccggaaccacctcactttacggcggaaccggtttgggattggcaatttctaaaaatattgttgatatgatggacggaaacataaccgttcgctctataaaagatataggaacagaatttacaattgacgtaaaactgggtatcagcgatgaggaattgcttcatcataaacataagaaaataacatataacttttcgcatctaaagacgctggttgtagatgatgatgtgacggtgtgtgaaagcgctgtcgttaccctcaaagaaatgggagttaaagccgaatgggtggacagcggcataaaggctattgaacgagtgaaagagctttacaataacaaaaaatatttcgacatgatactgatagattggaaaatgccggaattgaacggtatcgaaactgcacggcagataagagaaattgttggccctgacgttacaattattattatgaccgcctatgactgggcttcaatagagcatgaagcaaagttagccggagtaaatatgcttatgagcaagcctatgtttaagtcgtctcttatttctgctttttctaaagcgatgggtgaaaaggaagagaaatcacagcaggcgaaaaccttggaatacgatttttcaggaaaacatattttactggttgaagataatatgataaacactgaagttgccgttatgctgcttaaatccaaaggattttctgtcgataccgccgaaaacggtctgcgcgctatagaaatatttaataaatctcaaaacggatattatgacgcaatcttaatggatatacgcatgccaataatggacggtctcaccgccgccagcaatatacgccacttaagcaacggcgacgccaaaactattccgataatagccatgaccgccaatgcttttgacgatgatatcgaaaaaagcaaggctgccggtatgaatgcacatttagcaaaaccaattgaacccgacaaattatatcaaacgctttatgattttatttttgaacaggataaataatatcaacgtactataaactggatctgtaataattttaaaatatgaaatataaaactgttttacaatttttacgacattaaatataaggaggtgaatattgtgtccgataaaaattctccggctatagaacaaataattacaatacttaataactctccgacagcaatatatgtgtcggccattgataattatgaactgctgtacataaacgaaaaggccagagacattctcgcgagcaactcaaccggtcaggaacgaacctgctatgaggctgccggtttcactcagccctgcccattctgtcagacgtccaaaatgagccgggataaatttatggttcgtgaattccaactacctattgattcgagcatatatcagcttagcggtaaaattattgattgggacggcagagaagcccatatcgaatacataacagatattactgagagaaaaaaggaagagaacaaatctaaggctgtcaaagaagaactacagactactttcagctgtattccatgcggattatgcgtatataaatttgaaaacggcaaaatatcgccgctgtttcataatcccgctttctatggaatcatgggttactcggaggaacatataaaagaaattgagaatgataccagctttctcggcgttcaccccgacgaccttcctgtattacaatctaaaattcaagatgctattttaaagggcggactcgtacaatatatataccgcgtctggaatgataataaaaatgaatatcgctggatacgccttgatgggtcagttgaaacacaagccgacaatactaaatttttgtacggcgtttattctgatgttaataaacgggtactccttgaacaagaattgactgcagccaacgataaaatgcaggatattattaatgcaatccccggtggagtggcaatttataaagtatccgatatttttgaaactatctatttctcagacggcgtaccggaactttcaggctacacagtcgaagaataccacgaactcatcaaagaagacgctgccaaaatgacttattatgaagacaccgaaatggtggtatcaaatatacaggaagctataaaaaatcacaccgttaccgaattcgactttcgaaaacagcaccgtgacggacatatagtttgggtacatgttcaggcgaaacaaattggcgaagaggacggctgtccgctgatacactgcgtatttcataatatatcaaatctgaaagaaacgcagcttgagctagaccatctcgttaactctatccccggcggaattgccagttaccgtattgaagacggacaatttattccaatatttttttctgacggcatagtggctttatccgggcatacccgtaaagaactagaagaaataactaaaaacaacgcattagaagtaatatatgaagccgataaaaaacgtgtttcggatgaagctgtatcagcgttaaaaagcggaagggttttagatatatcgtatagggtacaccacaaagacggttccctggtatggattcacctaaacgggcgccgtatgggaccgctttccgactcttcaagattttatgcggttattaccggcatgtcttctgaaaccagactgttccaaagtattgcaaatgaaaccgccgacggtatatatgttatcagcaaagatacctatgaattattttacacaaatgaatcgaaaaatctttttctcaaagataatattactataggggaaaaatgttataaggcgcttttcggcaaaagcgctccatgtgaattttgcactctgaaaagtcacaaacctgacaattcggaacatgatatgttagttgacggaacagacaagttttacagcactcggtttcatgaaaccgactggaacggtatatccgcatatgtaaaatatgtgcgtgacgttacgaaagaaactaaaatcaaatttgaaaaagaacggctgtctatgtattttcaaagcgttgtagaaaatctgccgggcggaataaccgtaatacggtatgaatctgacaacagcttaatccctgaatatatatccgaaggatttgcctccatgtgtcatatgacagtcgaggaagtggagaacgtatataaaaacgatatatttgcaagctttcatcccgatgattcagacaatataaaaaataaagttctagattcaataaacagcggaaacagtcactgtgaactgacaggccggctaaaactaaaagacggcggttatatttgggtaaagagcactatttcattaatacattcttcggatggagtcaaaagattatatacggttcatactgatataagcaaatccgtggaagaaaaggatcagctcagacaacagtacgaaaatatactgctgcagcactatcaggcacccgggcctgacaccctgattttgggacactgcaacataacgaaaaataaaatacttgaaattattgattatacggattcagatctcttaaagactttcggctatgtgcgcaatgaattcttttccggcatagccggtttggtaacagatgaaaacgaacatcagcagtttcttgatacttatttaaacaaaccgtctttagaggcttatttaaaccatgatactgaaaagatattaaaatgctttgttaagctgccgaaagaagaaaaaggacgttacgtacaatttaaagtaaatatgattgaggcgccggacagcggagatattaccggaatactgacagtgactgacattactgaacagacaatatccgaccgcattcttcatcagctttcaatcaccagctatgactatgtcattgatttaaatctttcaaacgattctttcactgtcctttcatgcaataagaacgcccattgtgcgccgccaaagtatggccgtcattcacaaagggttcttgatatggtcagcacagctatagtacccaaagacaaagctcagtattcaaaattacttgaaccggatgagatacgccgaagattaaaaaaagaaggttcatatacatttgcctatgctatttcagacgaaaaaggagacatccggagtaaaaacatgactgtttcagctatagatttaaggcttgaccgtgtcagcctggtgtgttcagatattactgactctgtcagggaacagcaaggccttctcaatatgatagcatatacctttgacctggcgtgtctttttaacattgatgattcacgcttaacgctgtatacacgtcaaatcgtgcttgaaaatctgactccgtacattatagatgattacgataaaaaattaaatatttttgcaaaccaacaggatactgaaaaagaaaaagccgaattaaaaatgcggtttacaatctcatcgatgattaaaaatctttcaaaaaaaccgtccggttatgactttgtgtatccgcagaagacagaagacggtctcagatacaaacaaatcaacgtgctttggggcgatgaaaaccaccgaacaatctgtatggtaagggcggatgtgacagatatgctcgccgccgaaaggcacactaaagaaaccttagaaagagctctcgagcttgctgaagaagcaaataaagcaaaaagtgactttctatccacaatgagccatgatatacgcacccctatgaatgcaattatcggaatgaccactttagctgaagttcatcttgacaaccgtgaaaaagtattagactgtcttaaaaaaatatctgtttcctcaaaacatctattaagtttggtaaatgatatcttagatatgagtaaaattgaacgttcaaagatagccatgaacatagttccggtatatcttcctgatttaataaaccaaatagccgtcattatcgaacctcaggcgaaggaagccgggcttaaatttaattacaagctaaaagaaatcaaacataattatttttggggcgattctctgcgtattaaccaaatacttattaacattttaaacaacgccgtaaagtttaacccgttcggaggtaaaattgattttacagttgaagaaatcccggcattaaagacaaataatgttcgtttttgttttacggtctctgataccggcgtcggaatgtctgaggagtttttaaagcatatttttgatccgtttgcgcgtgacagttcagccgccaagattgaaggcaccggtctcggtcttagtattactaaagggcttgttgaactaatgaacggaaaaatctccgttgacagcaaacctgatattggcagcaccttcaaagttgaactcgaatataaaataaacaataacatagaaaaaacaatctccaaaaacaatactgaagattcgataccaaaagacaaaaacctatttttaggacggcgtttcttaatcgccgaagataatgacataaacgcagaaatactctgcggcctgctagatttatacggcgctgaatataccgttgaagagaacggagaaaaggcggtttctgcattttcctccgcggctcccggaacttatgacgccatcataatggatatccaaatgccaaaaatgaatggatatgaggcaacccgcgccataaggaacatcggaagcccagagtctaaaactataccgattatcgcaatgaccgcaaacgcctttgctgaggacatacagtctgcattagactccggaatgaacgcccatatatctaaacctgttgacgtaagcatactgctgaacactttaaatagattattaaaaaacaacaaggacggctaaaaaaataattggaggatattctatatgtttagaaaaatagtgttttttcagctcattataattttgacatctatttttcttctctcaggatgcacagaaaaaagtaaggttgtgagttatccaaataatcccgatacaacaacaataacttttttcggcaataaatacgagacagagaatgttagagttatagaagaaataatatcaaactttatgaaagaaaatcctgaaatcagagtttcttatgaaagtcttaaaggaaacgaatactatgaagcattggaaaagcgtattcaaacaggaaaagctgacgatgtttttatggtgaatcatgacattcttcttgagcttaaatcccggggcaaagtgactgacttatccggtctcagcacaatcccaaactatactgacagtatgctcagtcagatgaacgacaacggcagtatatactgggttcctactactgtttctgtttttggattatattgcaacaccgacttgctgaaaaaacataaacaaaaagtccccgaaaatttaggagaatggagaacagtatgcgattactttttagagcaaggaataacgccgataatagccaacaatgatatttcattaaagaccctagctataggaaaagggttctactcagcttatcaaaacaaaaaccagcaagaaatctttgagagtttaagttccggtgataaagttctaagtgattacttaggatccgggttctctcttgtcaatgaattcattgacaagggctatattgacgccgctaaaacccttaacactaaaaaaacttcagatgatttgacggagtttgtaaaaggaaacacgccgtttatgctgacaggagcttgggcggcaggacgcgttgctgaaatgtctcccgactttgaatttcaggttgttccctatcccgcattggacgatggctccttagaagtcattaatgctgatactaggcttagtataaactcagaaacggcaaatcttgacgaggcaataaaatttgttgaatattttacccgagatgagaacatacaaaaattcgctgaccagcaatcatcgttcagtccgcttaaaaacggttctccctctgctgttaaagaaattcagccgcttgtttcttgttatcaatcatcaaaaacagtaataggaacagactctatgcttgatttgccgatttgggatttaacagccgacgcaactaaaaaattgctttcaggcgagtcttttgaatccacaatgcaatggatagacgaacaagctggttcggaaaggggtgctcctaatgaaacgtaacatttcaggcaatattaaaaagaaaattgctttcgccgcaattcttataggtattgttttagtttcccttacacttctttttatacggggagttcaaaatcaattatgggaagaatctattacagctattatggaaaacactcagcaaggctgcaacactcttcggatccagctcaaaaacgattatgagtcaatgagtgtactctctaaagatataaaaaaatattccctaagccaaacaaatgaaatagaaacaattattaataactacagccatgtagaagaaaatataagtatgtataccgaagacggcagttatttcccaaaaggaaaccaaattgacaaaacagtgcaggagacggttttgaactctgatattacaaatggaattattgacccgcacatcagcagcataaccggggtaaacgtttttaatatatttataagaaccactatgaatgatggaacaaaagcctatttggtcaaagaatatgagatagaaaatatagttgaaagttttagtctctctttttataacgacgccggcttttcttatgtcatcaacaccaaaggagacgttttaatccgtcctccgcatccaaacagcaacaaaacagttaaaaatctttttgacatgctccctaccggcaaaaatgacgcaaacaatattaaacagtttgcacagtcattagaaaacaacgacaccggctgggctatatttacataccaaaacgaaaaaactgtattctgtttcacaccgttacggctggagtctgactggtttttaatttcgataatacctaaaaatgttgtggacgctcaaacaaatgatatattgattcgttccatgcttcttataggctgtatacttttaggaataattctcttggcattattttatttccatcatgctaataagacaaataaaaaaataaccaaccaaacaaattatattggtcacctgtataacgccctcccggaaggggttgcactcataaccgtaaaccagccgtttaagctgatacagctcaatcaagagggacttcggcttctgcattatcccgatggctcgctgaatgatgcgccaaaggggaaagacttaaaagatttcatttatcatgaagacgctgacagaattatcaaagattttacaaatgtatctctaaacagtcagagaaacacttttgaacacagaattgtcagaactgacggaagctttttctgggcctcagttattgtcgagaagacaatcagtgaaaatggagaaccggtgttaatcgccgcgtttcacgatataacaaaagaaaaattagccgaggaagccgcagagagggaaaaactccaggaaagaatcactcttgttaaagcgatatccaacgcctaccctgttattatcagtataaacctttccaaagacacactcaatttcatttatatgaaagagggactcatgattgggctcggaaagcaaaagacatataccgaactatataatcaaattgtttcaaccattcacactgacagtattgaagaatttaaagaaagatttgcacccgaaacgctgacagccgctttagggaaagaaaaaaatgaaatatttatcgaatgcaaacaaatcctttcggacaaaaaataccattggatttctacacaaataatatatgtagacaatccatattccaaagataaactagctatacttatttcacggcgtatagatgaacagcggtatgaagaagaacagagacggcaagcgcttcaaagtgcgctagacagcgctaaatcagcaagcgaggcaaaaagccagttcctatcaaatatgagccatgatataaggacgcctatgaacgctattttaggaatgaccgccattgccaccacgcatatagacgaccgtgaacgcgtattagactgcctgaaaaaaattgggctttccagcaaccacttgctcagtcttattaacgatgtgcttgatatgtctaaaattgaaagcggcaaactttctcttagaaacgagccttttaactttgctgaacttgttgccgattctattgaattggtacgttcacaagccattgctaatcaactcaaactcaatgtgcgttttgatgtaatgaaaaacgaaaacgttatcggcgatcctctcagaatacgccaagtatatattaatattttaagcaacgcggttaagtataccaaacccggaggcacagttagtattgaagtaaaacaaaggaagagtatacataaaggatatcagaactatatatttgtttgctctgatacaggaataggaatgagtcctgattttattgaaaaactatttcagccgtttgaaaggtcaaacgattcatctgctgacaaaataaacggaaccggccttgggatggcaataacaaaaaatataattgatttgatgaacggagatattcaggttgaaagcactctcggaaaaggttctgtcttcacagtcacatttccgctgcagcttcaagacgccccaaaagatgaaattcctcatgaatggaaggggatacgctgtttgataattgacgatgacatacagtcatgcaaagacgcggcggaacttttagaggaaatagggttgagagcagaatatacaacagaaggaaagactgcggtggaaaccgtaatccgcgaaaaagatacatcagacccattccgccttgtaatcgttgactggaaaatgcctgatatggacggtattgaaaccaccaggcagttaagacagaaaataggttctgaaattcctgtaatcattctcaccgcatatgactggtcggaaatagaacatgaggcgaaaaagtcaggcgtaacgtcttttatctccaaaccgttctatcgctcaaagttatgttacttgttgaatgagctaagcggagataacacttcagaagagtcaaataacatattagacattacaaatttgtccgacaaacatgtgctgctggttgaggataatgaaattaaccgcgagattgcacgcacaataattaatgaaatgggtatacaaacagatgaggcaaaagacggagaagaagctgttaaaatagtatctgaatcagaaattggatactatgatttaattttaatggatatacaaatgccaaagatggatggttacagcgcaacaaaagctatccgactgctagacagggctgacgcttccgggattcccataatcgccatgacggcaaatgcctttgaagaggatatatgggcggcgcggagagcaggcatgaacgggcacctttctaaaccagtaaatatagaaaaattaaagtccactctgataaatgtattaaacggtaacagcgcggattaaaattctcttgttttagttttatcggcttgtaactgattttgacagaaccggtgaagatgtattttatttgcattacagtcatatcatacagaaagcaccaaaaaaattatatcaaactatttataaaataagtatttggtatatagtgacttttaaatagaatgtgcagataagataaaagtaatactattgcggcagcagtatatgaatgtatatacccatacgctttactcaatttgtatcatttaaattgagtaaattcgcttattggaaaacccaaccccaaagcccccggcgggttgagttggaattttagaaaaccttattccatgcgggtttacagagttacgccgcaaaaagatataacttgcatagcatattttattaatttataaacaaaaatgacgctgtttcataaatgtatacagcgtcatttttgttatataattttggatttaattccatttcatttgactttattacaactctgcttaatattatccgtttgcgctctcaagtttaaaaaacacttttttagaatatagagatattcctatagatacaacagccgctcccagcataatcgcccacggaaccatagaacatacgtcaaataataatccatacatcgcctgacctgcaggagcagcgcaattagcaaccgccataataagcgccattatttttccaatcaaatgggacggcgtctgctgctgaaccatagagcacatttgaatagtaaacattgtcgacagcgccattgccgcaaaactcataccggtgataagccagtatccgaccaatggcggaacaaatgaaaacagtccgattcccataacaagagccgaaacagaacacccggcaagcaacagataaccatttttaagttttagtcttcctccgataattcctccgagcagccctcctgccaaacctccaagaccaagcgccccctgagttatacccaaacttatatcgctcatttgaagtatatttacaaccataataggtattcctacaatcataacggaagaaaaaattaaattaaaaagcgccagaataacaataaccggtacaaactcaggtttttcatttttgatatatcttccgctttcttttaagtcatccaaaactattgacgccatacttttttctgactttctctttttaaacggaatatgtataaaaatctccattactgccgaactaaggaaacacgctgtacttaccagcaatattggaacaagcccccaggcgccgaacaagatacctccgattataggacccaaaagactcgccagagtgtttaccatgtttataacagcatttcccctcataatctgctcattttcaagcagtgccggaatacttgcctgaacggcaggctgatatgcgccggatatactgtagagcagcataaggcatacaatcataataggcacaattggcagtataccgtgtatcaaatagaatactgcaatgatagccgccgttccaaagtctagaatcaccattatatttctcttgttgacccgatccgccagcactcctccaaacaatgagaaaattatcattggtataaatgaacacgccgtgaccgcgccaaacaaagacggcgatccggtttctctcagcaaatacagcggcagcgcaaaacgcagtatagcgttcccaaacagtgatataatttgccctataaccaccaatgtaaaatccttttgaaacaaaatctgttttttcatatttctctccttttacaaacagaccaacagtctgtataaattttatataaaactgctctatattgggcagcttattttattctttttcttttttatttattgatttactatattcaactaaagtgtcaattaactcttcatcaagaatctcaaaaccatatcctgacgttatttcattgtatacagcgcatcttgccttaacctcctcaggagttgtgggctttataagaggatgaagccaaacgtttgccaatattaaaagagcctctgcgagttcgtttggatgctctgtcttaattgaaccgtcttttattccctgctctaagattggttttatatataatggagcaacctcgttaaacacactttgtatttcaattgataaaaacttgggattatcaagcaagtatggcacaatatccattatccgcttctgactaggacaaagcaaagagactctaaaaatctccttaagcttttcgacccctgaaaggtcttctctagagactattttccgcagcactctctcactttcctgaccgactctgtcacacactctcaaaaatatttcttctttagaggaaaaatgatggtatatagcgcctttggataagtttgttatatctattatatcctgaagcgatgtttcatcatatcccttttcagcaaaaagctttgccgctgtatctaatattaattttacggtctcctccggatatttatttcttgacattttttcaccccacttacagactaacggtctgtatattatatcagagaggaaattatttgtcaatataaatttattttaaaaaatttattggaaactgccgctaaagcggcagtttccaaacacttacatactaacgcactttttccttcttgcagcagcagcatgatgatgaattcggctgccaaattgcatatagaaccacatccattgtcaaaggtcctaaatactgtccgggctggtacataacgccgctgccgtcagcataaatattccagccgacgaaggtatatcctgttcgaacaggcatatcatcaggaatccaaacctcactggcgtcaggaatctgtatcggtgacggtatattttctgcaggcggaccacccgcgtcgtttggttcaaatattaaaacacgccaaggaataataattgcccaatgagcatacagcgttatatcctcagaagttccagacggtattacggtcacctgagttccgcccgactcctcagtaaaccatccgacaaattgatatcccggaggcccgtcaagcggctgtaaaattatatcaggagaagtccccgtaaaggttgcaggatttgggttatatgcgccaagagtgtttaaataggttatcgtgtgaacagcctgatcaagaattatttgagttttatcactgctcagccgaactttccagtcatcgaaactatcaggcggctttataaacgcgtcagcgtcttgctgtgacaaaaccgggtatgaatttcctgacgccaccgccgccgctatagaattcccctcatcatttggcgtaagataaggcgagttgtttaactgtatcttggagtcgggcagaatcgtgctgttcaaaattggtactgatgaaacatcagacccaatatacactccgttttcaatatttcttgttcccataatgttgagttctgcggaattgtaaatacccggagctgttgcggcagaatttggatcttcatcacctaaagagacactctcgcttaaatatacaacagaattgctttcattgtatatacctcctcctgcatttgctttatttccatttatactgccgtttttgaaattaaataccgaagagttttttaaatatactccccctccgaattgacccgaaacattaccgtctatggttccttcctgcatatttataacggcgccgtccctagcatttattcctccgccgtttctgcgggctttattatctctgacctcaacagagtctgatagattcattgtaccatatgcgagatacacaccgccgccaccgttatttattacatcatttccgccaacagcagaattccgattcacttttgcactctcacacaaatttagcgttcctgccggaatattaaagtatattcctcctccattgccattgattgtctcgttgccatatatgcttgttgttccattgaccgtcaaactgctgttggttcctgcggcccaaacgccgcccccgacattatcagcaatattgccagatatatccgcgtcctgaataacagcgtttagctctcctgaaccgccggataaacgcagtcctccgccttcactgcctgatttattatcaatcaccgtatctccaataaagtttagaaccatgggcgttgtgccgctattagtgcagattgctccgcctccgctgacggccgcactgttattgcagatagtattattattaaagcttattttcccgccgtctccggcaatgcttattcctccgcctgcggaacctgctgtattctcatttattgtattttcactgaaagttaaatccgactttgctttgtcattaatatatatagctccgccctgataagaggaggaattattttcaaaattcacattgtttattgtttcagtcagaattttgtcggtactgttatttataatataaactcctccgccgtgtccgtttgacatattggtggaagtattaaaatcaatttgcgtccctgttaaatttatatttcctccgttctgagtctgtaaataaagaccgccgccgcttccggcactgttgtcctttagcgtaatatctaaaatctccgcatcagccgagctttcgtcctggaatatcatatatactcctcccccagccttaacagccgaattctgcgcgaattctgctccgcctgacaaactgaccgagtcgccattaaaggtgcccatataataaaatccgccgccatatccgccggccgtattatttgtaaatttcacctcgttatttattgtcagagttaatggcactgtatttccatttataaaattagaacagtaaacccctccgccatctccttccgcttgatttccgatgaactgaacgttatcacccaaagtaaggtttccatttaccccttccaaatatgagcggaaatataatcctgcccctgaagaagctccgttattgcttatgaccgaccgtcctgtaatagaaacgctgtcgctgttatttctcagcgccgccataatcccgccgccagtggttttggaataacatccggtcaccttggcattatcccgcatcaccaaagcgttggcgtagtttgcgtttcctgacatatatacagctccgccctcagtataagcgttattattttgaataaccgcgcctgtctccagggtcagtgttccgccggctaataatacggcagacctgtttgtgctgttatcgtttggatgtttccctgcatttccatcaagtataatatttcggagagttaaagcaccgcagtttgtaatactgaacatatttccaaagaaagattcacccttgaaaatagtacgaacattggctgaatcaatactgcttataacaacagcatatctgattaccagccgtgctgtcagagttatatcagtatccacttgtatgaaactgtcatgtgcagctattgcagcctgcagttcactctgattattaacaattgccaatataatcacctactttttaaattatcgggcgcatttaataatatgctgtaaaactttgtaaagtgcagacattatgacaaatttcgtaaactcacatataatattttttacagcaaaattttcgctattgaataaaacatgcggctgtgttaaaatactgtttaatatcatcagctttggaggtgaaaatcatgcactttgttaaagctaaatccattctgtcttccaaaaacgggattaatatctacaggggctgcagccacggctgtatatactgcgattcccgcagtacatgctataacatgagccacagttttgaagatattgaagttaaggaaaacgcccctgagcttttaagaaacgctctaataaaaaagcggcaaaaatgtatgattggaaccgggtctatgacagacccatatattcctatagagaaagagctgcgctataccagaaagtgtattgaacttatagatgaaatgaatttcggactcacaatacttacaaaatcttctttaattttaagagatttagatattttcaagaatataaataaaaactctaaatgcgtcgttcaaatgaccctgacaacctttgatgagaaactgtgtaaaatactcgaaccaaatacatcatcaacatatgagaggtttaagacactagaagcaatgcacgacgcaaatatacccgccattgtgtggctctgccctattcttccatatataaacgacagtgaagaaaatctgatcggcattttggattactgtgtacgagccggggtaaaaggtataatctgctacggttttggtatgaccctgcgtgacggcagcagagaatatttttatcaaaaattggacaaacatttcccgggattaaaagagcgctatataagagactttggtgactcgtacatagtcactagccccaacaaccaaaaactcaccgacgtatttttaaatgtttgccgtaaacatgatataatgaccgatgtaaaaagcatttttaaatatttgagcgcctacgaagataagaattttgaacagctcggattttaaatatctagctgaacggagtgttgactatgcagtttaaagacaaaaatattgaacaaataaaaattaccgtcttggttgaagacactgaaaacgaaaaccttccttcagcccatggattgagtttatatattgagacgcctgaaaataaaattctgttcgacatgggaccgaatgaactattttgggaaaatgctgaattccttggaatagatttaaatactgtggacactgctgttatatcccacgggcactatgaccacggcggagggctttcaacatttttagacaagaacaaaaatggaaaagtatatattagggaaaacgctttcggagattattattctacctcacaggggaaagcgcgatatattgggcttgacaaaaaactaaaaacaaatgacagacttatattaacagcaccgggaataacccaaatcagcagcaatctaactttattttcaagcgtggaaagtaaagaactatgccccaattcaaacaatgtactttggaaaatgacagagcacgggcttgtcaacgacaactttgagcacgaacagaatctgataataaaatcaggcaataggtatatacttgtcggaggctgcgcacataacggaataattaatattgaaaaaaaagcacaggaaatcatgggtaccgctccggatttcactatatcaggctttcatatgtccataccgggaagcggtcagagcgagccgcccgactttgtacaaaaagcggctaaccgtctcagagaaagcaaaactatacgttatacatgtcattgcacgggaagcgcttcatatgaactactaaaacaaaccctcggagaaaatttaaggcgtttgacgccaggctgtcagattatactttaacttttttatatcgtattataattcaatatattatttttaagattctatagaattctataaaattcatagtatctatttgccgccgactttctctctcagcggcatctaaattactaagaaattttgtattgatagtccgcaataaatgaaacagaaatgttaaggctatatatcataaaaataaatattaaaatataataaaaaatgtggtataacaagcttcggcggggccgtaaacacactttttttagtgtgtaataaaaatcactttgtatcgccaccaccctacaggtgtgatgatacctatcaatgttcactaaaagacactgtattgtgaatattaatctaaaaataatataaagatatggttttgcaagcatcgaagggcaaacacagtttgccgcgtaaggcgcgcagttgcggaaaatttattattaaaaatgattattacaaaaattctctagtatgtttacgctttccgtgatttggcaactcacctaacgagacacgtaaacgcgcgatacatcacaactgaggtaattattggcatatatagtttatataatatacacttttatttaaaagtatagccacaattgacattataggttaatcaaaacaaggcactttgtatcgccccaccctacaggtatgatgatacctaccgatgttcactaaaagacactgtattgtgacattaatctaaaaacaatataaagatatggctttgcaagtatcggagggcaaacgcagtttgccgcgtaaggcgcgcagttgcggaaaatttattattaaaaatgattattacaaaaattttttagtatgttcacactttgcgtgatttgacaactcacctaacgagacacgcaaacgcgcgatacatcacaactgagtaatttattatatgacaactgagttaattattggcatatatagtttatatcacattatttagtttatataatatacacttttatttaaaagtgtagccacaattgaccttgcaggttaatcaaaacaagttattttgtatcacacccaccagaggtgggggcacaccactaaagaacactgtattgatgatattaatctaaaatattataaaataatatgattctgcaaacttcggaaggtgtgcccacctgtatcataccttccggcggcactattaacattcttatttttttgttcagtctattgtgtcctatattttattcgcaaggaagctatattgaaaaactattagcaatttataaaaataatatttataatttattattatttctgacttactataagaatattgtaacttacactgatatattttacactgacacaatcagctcgttaaacaagaatcaaaataaaacaaaccccataaaaacatatgtttttatggggtttatactatatatgctccaaatcttgaattatattatactatcttaaccgcatacaaatccggcagccatgttgatagatttgtaaatgttaaggtaccgtttgtcaggtcctgcggcagcgtaaatgttatcttgctcagctgcagctctttttctgctcctgctggagtcaatgttacagggctttctgttctctctgctgttgccaccactcccgaaccgtctgacaggctcattgttattcctctgttatacgctccgataaagtataccgtatgggttccggctgacaagtttattccgttcacatatgggtctcccaaagtatttgaagcatttggatttcctataaaatttttatatccttttacatattcattatcaattgttgtaccatttgagcagaacatatactgaacctctgttccgataaaatcatcacttattgcaaacgttcccgcctgctcattctgtctgcctttcgaaaaatcttcagctatataactcagctgtttcacaaacttgaccgcatataaatccggcagccatgttgaactgtttgtaaatgttaaagatccttctgtcaaatcctgcggcagtgtaaatgttattgcgctcagccatagttccctggcgcttccgtcctctgttattacaacaggagtctgagttcttgtctctgacaccactgttccagaaccgcttgccagattcattgttattcccctgttgttgcttcccaggtaatacattgtatatgttccggctgacaagtttactccgctcacatatgggtctccttttgtactgcttgagcttgaatttccgataaagtccttataacccttaacgtactcattatcaattgttgttccgtcagaactgaacaaagcctgtatacccgttcctgcataagaaggttttaatgtaaacgttccgctctgctcgttttgtcttccattggcaaagtcctctgcaatatatgtcacatcaccggttacaggagccggttccggcgttggagttaccgcctgcttaacgaatgctgtatacataaccacccctgacggcggtccgtttgttcccaaagttaccttatcgccttgattaaagtttttctgatatattttataggttacgtcatttgaagcctgcagtatatagtcgttagctgtccatccactcagccacgacggcaaattggatactcgggtatccaaccctacatacactgtgattgcgcttccagcagtgaactcagctacatcagactgaagattctttgaatcgcacgctattcttatccattcagcacctttgagataattagatacatttgtaaaagtattggctctgtcgccgtagattacatcgcctgtctgcagattgtactggattgaccagtccgcagcgttggcagcgtcttttattgtcaatgacttaatcaaatttccattaagaattggcgccgcagttggctttggtgttgccgtcggcgtcagttcgggcgacaatgtaacggttcctttcgggaacgaatcaattgttaaatcatggctgtaatactcaatattgttatatcctttaccctgataatcaccggttgcatcgctggcgctgttaggattaagaccgcgggcaatctcccagctgtcgggcataccgtcgttatcagaatcaacgatctgttttgatgacgacgatggataataagaattataatccatatgtttaatgccatatttagttatagcgtccaaaacagcactgtctgtcactgttgaaaaatcacgtccgcctgtaagtgatccggtgcctgttcttgtctcttcaataacctgcttgtcaatcttaggacgtgacgccgcatttattcccgaacctgcataagcaagcacatttgaataagccgcgtcagcgctttcgggattttgggcaactgatacgttaaccccatttacattaatcggataatgggaattagaacgatagtatgcttcgtcatatccggcgcttccaaaattgaatccgctccagttattgtttgtttgtttactcataactgaattatccggattaaccattttattgcctgttaagtaaaacttataattctcaggcgcggtcccgcttgaaatgttaataaagttatacccgccctttgtggatgggccggcttttaagtaattgtttacatagttctcatgtccgaatgttccatacgcggtctgactgccccagtcatagattacgttattaacaaaatccattgcataagttccaacaaccttgcctctgaagtttcttgacaagctatgacaaatcaagttatgatgccaggaattttcaccctttccaaacataaccccaaatccatgagcacccttggaatgatatgatacacagtcagaaggcccgataatggtatactgaaccgtttggttcatattattggaatacaatccaaactgctcgtcatttgcccagcctatcgaacagtggtcaataatagaattagagccatttgaaccgccccaggcgtcataatcaccgctgcctttttcaccaggtctagatgaaatatagcgaacgataatattatctccgcccataccaatcttgccgtttttcagggttatgcctgctcctccgggagcagtttgtcccaaaatagtgacgttgccttttacaacaacatcgctcttaagcgttattgttccgccaacgtcaaatacaacgattctgtttgatgtaccgacagcatccctaaaagagcctgagccgctgtcatttaaatttgttacatgaaccacctgtccaccacgaccgccggttgcatacataccgccgccctctgcaccagggaaagccggaagagtattagccgcgctaacctcgcttgtatcaaatactgttattaaagagactaacataaacgccgatattaccatacacacaatcttttttaacattattgttttctcctttaactttatattttatttaataccacaaacacaacttatactacaaatacaataatactattttgtactcctcctttactattatattttttctgccctcctttctaattaataattttttattttgtttctttttctttgttaaaaattaaagatgtgcattcaaaataaacgcacagcccgactatgaataaattaggtaagaaacaaatttttgtttcaagttatcaataaaaaatttaaacagctatataataggaaaataaaataaaattatagagtactgactaaaatttttaatgcagccctagggggatagatatctatccccctaattgtttccgtttaacgattatatagactgtaaaaaactttttaacgtcttttatactatcttaaccgcatataaatccggcagccatgttgataaatttgtaaatgttaaggtaccgtttgtcaggtcctgcggcagcgtaaatgttatcctgctcagctgcagctccttctctgctcctgccggagtcaatgttacagggctttctgttctctccgctgttgccaccactcctgaaccgtctgacaggctcattgttattcctctgttatacgccccaataaaatataccgtatgggttccggctgacaggtttattccgttcacatatgggtctcccaaagtatttgaagcatttggatttcctataaaattcttatatccttttacatattcattatcaattgtcgttccatttgagcagaacatatactgaacctctgttccgataaaatcatcacttattgcaaacgttcccgcctgctcattctgtctgcctttcgaaaaatcttcagctatataactcagctgtttcacaaacttaaccgcatataaatccggcagccatgttgaactgtttgtaaatgttaaagatccttctgtcaaatcctgcggcagtgtaaatgttatcgcgctcagccatagttcccgggcgcttccgtcctccgttattacaacaggagtctgagttcttgtctctgacaccactgttcccgaaccgcttgctagattcattgttattcccctgttgttgcttcccaggtaatacattgtatatgttccggctgacaagtttactccgctcacatacgggtccccttttgtgctgcttgaacttgagtttccgataaagtccttataacctttaacgtactcattatcaattgttgttccgtcagaactgaacaaagcctgtatacctgttcctgcataagaaggttttaatgtaaacgttccgctctgctcgttttgtcttccattggcaaagtcctctgcaatatatgtcacatcaccggttacaggagccggttccggcgttggagttacagcctgcttaacaaacgccgtatacataaccactcctgacggcggtccgtttgttcccagagttaccttatcgccttgattaaagtttttctgatatattttataggttacgtcatttgaagcctgcagtatatagtcgttagctgtccatccactcagccacgacggcagattggatactcgggtatccaaccctatatacactgtgattgcactgccagcagtgaactcggcaacatcagactgaagattctttgaatcgcacgccattcttatccattcagcacctttgagataattagatacatttgtaaaagtattggctctgtcgccgtagattacatcgcctgtctgcagattattctgtatcgaccagtctgcagcgtttgcagtatcttttacaaccagcgatttaatcatattgccctcaagaggttcgccgcccccaccgttaaagactactgggtcgccggcgagttcatttaagtacatttcaacatttgtataaccgtcagctgacagacttaccgcacttccgtctccggaatcgttaggattgagcccatgactgttttcccaattgtcaggcatgccgtcatggtctgaatctgcaggcgccgttccgcctttaaagttagatgaatttggatagccgcctgcgtcattctgactgtctataatacctttcaacccttgtttgctgcctttataagtataggttcctgttgtaacttcttttatatagcgtgaatctatataatcccagccctgagcgtttgcgcctacaccgtttacaacactgttataggcctcgtctgatgattgggtgttaacataagattcaaagaaaggcgagttgcttcttacatcggaaacagaaaccttatttcctgatgaattattgcccttgcctgccgttaccgcttttcctttgctccaggcgtcatcgcttggattcagaagcacagaacctccgagtgctaccattttattacctgaaacatatgccttctgcatatcataagtattcagctcgttgccgtcgattgagactatgtgcatattagtgttgctttccgctcctgctttgtaatagttatttacgaagttaagccgtcttacgccgccgtctgttgttctgtctctccagttataaacaacgttgtttctaatatccacattgccgccgtatgtgagagcgtcttgttccatacctcctgccaatgaccagtttctgccggtgcagtttataagcagattatggtgaaagcttccaacataaccgctgattgaagccgcaaaagcatgaggttctgtgtctgtacggtcatcaccgttataatgcacagaatcatgcagtgactcgccgattatattccactgaaaagtgatatttttagctgaccttgagctgaatccctcgtctgttgcccatgatactgaagaatggtcaataatactataatcgcagctgcctaaacccataccgcctgttgatttgccgtccatatccccgactcttacacggatattacgaataataacgtctgatgagcccatagcaccaaaatcataatttatcaaagttataccgtctcccggcgctgtctgacctgccacatatacttcgccgccgtcattcggaataaccagcgcacttttcaactggataacgccgccgacgcggaagacaacaatacgcggccccttttccacctcaagagcctgacgcaaactgcccgagccggagtcattgagatttgtcacctcaacaatacgtccgccctgtccgcctctggcgaaacggccgtaaccctcagctgtaggaaacgcaagacgagccacctgaaaactgtacacagcccccttagtaactccgctgcttccgacctcatcaactctccaatagtaagtgttgagcgaagaatagctgtcgtccaaagcataattcggagatgttctgtttcctttatactccgccgaatttttagtcgcgttatacacgctgttataatctgttccgatataaacatcatgactctttgcgccggagcccgcagtccatgaaagacctttttctgcttccaaatgtctttctccgtctttaggggtcatcccagaaatggacttaaacgggtcagcgccgtcaatttcaaacgcattaagtacagcaccgtttttacttgtgtcagttggctgaattaaaaccgtaaccgtaccgcctgaagcattaaaggtcgtgaatgacttacccgcattctcatcgtttgttacacgggtaggaaccgtgaccgtattcgattttgaaccgtttacggtaacagtcaccggactgccgcccggccaattgtcaaaatagctgtgccaggtagtgagagtgtgcgttcccgaagagagaccggagatttcaagcttgataactccgcccttatctgcgtccttaatcgtcacaccatccattgtaagagttggggttgtcccatctgactttgtcaaactcttataactggctgacctaatgcctgaacctgtgttcccgccgttgctgagtttaaatgtaacaccgttaaaaacagctgttggtgtagtgcccgatacaatccaattgtaagcattattcgtatacgaattctgcctgccgtcatttgcgtttaggtccacacgaattctgctgcccgtgctgaacaccggttcctgagcggcggtgtagccggtcagcgtgcataataccattgccgctgagagcgccgccgcaaacattttgcggaaaaattgactttttttcatgattgttcctccatttctattagactatataagcctgccgacttgtccgctaacctgtcgtccaaacccatatagcctttatttccgtaaatatataattataattaaataatgtcaatgatacgtatatcataatattatatcatttgcgattagttaaattgtcccaatatttttgtaatacacagcagaaataatctgttatattcaacaattgcgaaaattcggtcacgaacagcatttcagtctcttcaaacgttttcatattctaaagcaaacgaaatatagaactctgaacatgtattatatatataaatttgccatatatacaaaaataatttagattaaaataaaaagaagctgcgccataggcgcagccccaatattttaaggagagagttttaaaaatttgtgccgcacaatcagcgcggactttttattattatcatcctcacgctgtccttgagcggtttaacagcagacacggattttcttgattccttttgaaacaaactttgtaaaaatgtttttactgctgccatattattacccctttctggttctattcttaccttacactattattatagcaggcaacgtgtacaataaaacggacaggtgtttagttttattttttaatttttcatatgcagtatacattaatttaccagaaaattcttgtattattagttaattatatgtgaattttttgggattatgccggttcattaaacgaatttcgaaaaataaatatatttgttaatacttttgtcttgtgattgaaatatgcttatgctataataaatattataagaaataatgctgttaaggaggctttgttatgatagctataggcagtgaccacggaggcgtggcgcttaaagatactataaaagaatattttgatgaaaatggtatagagtataaagattatggaacccagaaagacgttcccgcagattatcctgatatagcggaaattgtgtgcgatggtattttaaacggtgaatgctcagctggcgtattggtctgcggaaccggtataggaatgagcattgcggcaaacaaaatagacgggataagagcggctcatgtaaccgacgtgttttcagcaaaaatggcaaaggaacacaacgacgcccagataatatgtttaggcgaaaggataaccggacccggtttagctttagaaattgtcaaagcatattttgcctcaaaacacttaggcggccgccacggcagacgtgtggaaaaaataatggctttagagaaaaaacagtagttataataatattctcagaatacatctctcataaaatatatatgggaatattatatcttagaatatgtatcttggaatataatttctcagggttttatttccttattactatttcttggaatattacatcggccgccggcatatttttctgaatataaagtaattcagaggtgcggatatgaatagaagcttaacagattttctgcgaaccgcaatggagcctgtcggttccacaatgtatatctggggcggcggctggaacagtgaggacaacggctccggagaggacgctaaaataattggagtaaacccaaattggaaaaaattctttatatcacaaggcagcgattacgattataaagaacacagatatgagcatggaaacggcctggactgcagcggctatgtcggctgggttatgtataacatttttgaaaataaaagcggcgcgggcttaaattatgttacaaacgctgaaaaccagggtaaattatttgccgaaatgggtcttggtgaatactcagaagaattctcgggggtcaaacccggcgatataatgacgtcaaacgaccatgtttacatagttataggagagtgtaccgacggaagtatattatttgttcattccagcccgcccggagttcaaatatgcggaacaccggcaaaatcagggctttattacagctgtgccacagaattggctaaaaagtacactcaaaaatgctttccggagtggtataaaaaattttcgtactgccatcgaggcatgagttatttaactgacttttcaagatttagatggtatcccgaaataatgcccgacaccgatggattatattcaaaaactcctgaagaagtattagaaataattttgtgcaaaggatgatacaaaatgattgaggtaacacaatcaacagtgcttgattttgaaataaaaacagtatgggatatagtaacttctcttgaaaactacagctggcgcagcgacctgagcaaactcacggttatgaaagaaggagaaaggtttgtcgagtttgataaaagcggatacgccacaacctttgaaataacagaatttaaaccatatgaaagatatgaattaaacatggaaaacggcaacctatcagggcactggacaggaatattcaccgaaaaagacggcggaaaaacagaggtatgttttacagaagccgtagagccgaaaaaatctatgatgaaacttcttgccaaaccatatttaaagcggtttcaaaaaaagtatttttctgatttgcggaacgctttagagaataaataaattgatattatatccggggatatgccaaacatatgcgaaagctgatgataaaccctttcagcaaaattctattttgttgccgccgggattgacaggcggcattatttttttacaatagaattcaaagcaaaattttgccgaaaggaatataaaacttacttttttcgatacactcagggtatgtccaccaaacccttcaaactatcaataaagtgtgaagcgtttgacaatattcacaaacgccaatgcttttgacacttttacgaggaatgagaagtcagcttttcagccttaggaagaataaacagagtttccaaatcatttcccatttcttaattcagcttcaataataattacgcgtctgagtaaacgtattttatttgtacgacttttttcacataaccgccttttcaatatacacaggaattataaaaaactatttttaaatatattacacaaaaacggcgctccttttatggctaaaagcctgaaaactgcgctgttttgtgtaatcatagagtttcttttataatgtgattcgctattacaactttgttttttacagcatttttttatattcataattgtttattccaattatttacaaactgttaatattttataaaaacgcccaaaatacttgcgtttccgcacctgtttcagcagactatttatacaagattttctcactttggaaccttctgtcttgacatataccgggatatgttgtatactcttaacttgtaatgttacaattgtgttacattaagattacaattcgaggagtgcattaagttttgaattataaatcaaccagtgtaaagaaaagttttgccgcaaaaatgctgaagtgttttctgccgctgacaatagcgttaactgtgctgttaagctccgtttcagcttacgcggtaagtatatccgcccgcggggcgtttgttttagattcggaaacaggcgaagcgttgtttgtacataatcctgacacaccggtgccgccggcaagcatgactaagattttatcactatatgtgatatacagccacctggcggacggaagccttaccaaagacacacaaataccggtggggcgcgctttggcaaattattcgagagacccgggatattcaaacgtatacctggacgccggcgcctcatacagcgtagacgaacttttaggggcaatatgtgttgtttcagcaaatgcggcggttatggcaatcggagattatttgtgcggaagcgaagcgaattttgttgctgagatgaacaattggttatcggtctggggcgtcaacggttattttgttgactgtacgggagtgtcgagcggaaataaaatatcgccgagaggaatggcaacagtagccaacaggcttataaacgactatccggacgtattaaattatacgagtttgacatttcttaacttccacggatatacatattatccgacaaacaaaatgcttccgggcggagcctatgaatatgagggtgcggacggcttaaaaacaggaacgacctcagccgcaggatgctgttttaccggaaccgcggtaagaaacggaaagcgtcttgtatcggttgtaatgggtgagagttcaacaaacatgcgttatgttgacacgataaagatgatggattacagctgggacttgctgtcaagcagagcgaccaacggtcagacatattttgacagcacgcctaaggattacatagtagcgaccgacctgagatgtttcattaacgattgggagataccgacatttatccactatggaacagaggaaacgaattatcaagattgtgctgttgtaatgctcagggatttaaaggactatggatttgatgtgacctatgatttagctacagacaccgtcacaatagtaaacaatgttgacaaggatttgacggcgggaccgaattacggagagcagtcacagtatgacgatgaggagaaactggagctcagcgattgggagccggcgaacatactgcttaagaacggccctgacgacccgggggtttatgcagaaagaacctttgacataaacggaagcggggctatatcaatagatgagctttggcatatgggaacagtggtttggaacgagaagtacaacataacagtagtggttacaagatactaataaaaaagataggaagagaaattcttcctatctttttactattataatattttttataatagtgtccataaaagcaatatgaccgccctcgtgcaaaggacagctatattattttatatatctaaactttgacaaccgttaaacggttaccttttatctttaatcagcaagcttgcttgcgggttcaaagcagactctgagcctgtcgaagagagcttcctttaaagtgtttttattatagtctttttttcttagtttgtcaaggtagttataaaaaaatgtgaatttatgtaaagaatttttaatttgactttattcgatatttcccatataatgtttttagcaggtaaaaggaaattgtaggacggttgtcatctccatatgctgttgcttacagcagaaaggaggtgtcgcttatgtggaaatacttaattaaagtatttgtatctattataatattttttataatagtcactacaaaagcaatatgaccgccctcggcataggacggtcatataatttataaaccactatgacaaccgttaaacggttaccttttatctgtttttattatagtctttttttcttagtttgtcaagaatattttatatttataaattgttaataacatattgaacactacgtgttcagatgttggctcacctaacgcggcgcataaatgcgccctaccgatgttcacttaaaaacctgcttttgtgtaatgatttaacctaaaacccagttttttgttaagcaaattacttggaaatcggaatatttttttcacggcagcacacaaagtcaacgggaaaacaacaaggctttttcatcttgaagcgtagattcaagatgaaattagcgggggcgagcgccccttggagccgttaggcgacctaagcgagcaagcactttttcttttattttagtattcatattattgacattgtaggttatggcaaaacaagatattttgtatcacacgcaccatacaggtgcggtcacaggtgaagcgtttctttttcttgctagaaaaagaaatggttcaaacaccctattatgtaataataaaattttttatatggggtcatatacatagttaaaaataactgaataaaattactattttataaagaattaatatttataattatcaaacccactatcctcattaatatattgaggagacggaagtttaatattaagcaaatcccctgcgcttatttccaacgcatccgcaatattaaacaacgtttccaaagcgaacgaactaataatattaggtgcttctatattgcttaaatgcgaacggctgataagatccttttccgcaagttctctctgtgtcattccttttgacttccttattgccgatataattatacctaattcaacaaatttatcccaattcttaaactgaacttctttatgcattatttaaactccctataagtaatctttagcttttataaatagtaacacaaattttttaaaatctaacgttacataaacgtacgcataaaattttttagcaataaagaaaaaaatcaattttacttaaaattttttcaaaaaattttgataaaatacttgacaaatcccgattcagggtatataatgtacaagttctgtcggggtgtggcgcagtttggtagcgcacttggtttgggaccaaggggccgcaggttcgaatcctgtcaccccgaccataaggaaacgctgtggattacgagaggtgcgtggtctgcggcgtttttattttgcccaaaattatcttaccttttctttatcctaattttccataaattttataaaaatatagttgttaaatcattgacaatataccgtgtttcctttataatcaaggtatatgaaacagagcggatttttgccggctctatatttttggcgataattattttcggaatattatccgcccgaaaggagtacataatggatatcaaagtttgcataggaagctcctgccatctccgcggctcctacgatattattaaccttatgaaagacgccctcaaagaaaacggcctggatgaaacggtcggtatgtccgctgcattctgcctcggccactgcggcgacggggtcagcatcaaggttgacgaccaggttatcagcggagttaccaaagaaaactttaacgagattttttccagatatgttttaaacacagttaactaaggatgtgtaatcatgcaaaaaaattgtatacagcttgaaaaatcaaactgtaaaaattgttataaatgcgttagattctgtccgatgaagtcaataaaggtcgtggaggggcacgccgagattattcccaatgaatgtattctctgcggacggtgttatgttaactgccctcagaacgccaaaagacttcgagacgatactccgtccgcaaaagggtttatcgacagaggcgatgaagtatacgcctcagtcgcgccgtcatatatagcaaattataagggcattaacatagagataatgagaagcgcattaaaaaaactcggcttcaaagacgccggggaaaccgccatcggcgcaaccatcgtcaaaagagagtatgaaaagcttatagaaaacagaaagcagagcgttataatctcctcgtgctgccacagcgttaacactcttatacaaaagcactatcccgatgttctgccatacctagctaacgttatatcacccatgcaggcgcacggacaacttattaaaaatcagcatccgggcgcaaaagtggtttttatcggcccttgtatttctaaaaaggatgaggttgataaataccctgactatgtggactgcgccctgacttttgacgagcttaacgactggatggctgaaagcggagttgagttcgacttttcacaagaagacatgaccggaggcggtcgcgcgcgctggttccccaccaggggcggaattattgaaagcatggatatagacgatgatttttcatatttcagcgttgacggaatagaggactgcatgaacgcgcttgaggatatacgcgacggtaatattgagaactgctttgttgaaatgagcgcctgtgacagcagctgtataggcggaccggttatgaaacacgacaacattttccatgtcagcagttgtctcactatcgggaagactgccggcaggacagattttgatgttaagcagcccgagaacggaatcaggaaagtgtttgacgcggaatacataaaaaaagtaatgccgggaagttctgctattgaggaaattctgcaccaaatgggcaagaggacaaaggagcaggaacttaactgcggcagctgcggctaccccacctgccgtgaaaaggccgtcgccgtgctgaacggcaaggctgacatgaatatgtgcctgccgtttttgaaggaaaaggccgagtccttctcagacaccataataaacaacacgccgaacggtatcgttgttttaaacgacagcttagagatacagcagataaacaaatcagcgttagagataatgaatataaaaaacgcaaatgatattatgggcgagcctgttgtcaggatactgaatccgacagattatatgatggcaatgaccgacagtaaaaatgattctgaacctaagcgaaaatatctgagcgaatacaaaaaatacgttgacgagactataatatatgaccctgaatataacattattatgagcataatgaaggatgttacagaagaggagattatgcgggagaaaaaggccgagcagagcatgagcgcaattgaaattactgataaggttgttgagaaacagatgcgcgttgctcaggaaatagcctctctcctcggcgagacgaccgccgaaaccaaaatcgctttaaccaagcttaaggagactttgaataaagatgaatgatttatttgccgacgtcggctatgtcagccttaaccatgttggagaggagctttgcggcgatatggttgaaatcgtgcgccgtgaggacgagttaattgtggtgctcgcggacggtttgggcagcggagtaaaggccaatattctctcaacgcttacctctaaaataatctccaccatgatggcggagaatatgagtatcgatgaatgcgtctcaaccgttgccgccacactgcctgtctgcaaaaaacgcggcgtggcatattcgacctttactattatgaggttcaccggaaacactgaagcagaaataatccaatttgacaatccgcttgttatactgctcagaaaaggtaaaaactgcgaataccccatgactgaaagaattattgaggggaaaaagatttatgaaactaaaatgcccgtagagcttgacgatgtttttataatgatgagcgacggtgcaatatacgccggggttgagcgcgtcttaaactatggctggcagagggaaaacattatagcctatgttgaagcaaactacaactataagcagaccgcaaaaattatcgcttccgaaatagcggacgaatgcaatcgtctctacgcctcagagccgggagacgacacaacggttgccgctgttcagattcgtaagcgcaagacctgcaaccttttgtttgggccgccggagcacccggaggatgacaataaggtaatggcgctgttcttttcaaagcaaggacggcatgtggtatgcggcggcacgacttctaaaatcacggccaggtatttgggcaaggaaatagaagctgtttctgactacagcgacccttctattccaccgacagcctcaatcgagggtgtggacttagtgactgaaggggttataacgatagccagggttttggattacgcaaaaaattatcttgaggacaattccctatttgaaaagtggggaaaacaaaaggacggagcgagcgaaatagcccggctcctgtttaaagaagcaaccgacataaacctgtttgtcggcaaggctcagaacgacgcacaccaggacgcaaatttaaatatttctttcagcataaaacttaaaatagtcgacgaactgagacaatgtttagaagacatgggaaaaaccgtgactgttaattatttttagatatatagatttattatccggctaaaatcagtatcagccgagtaaaaacgggaggattatatatgaacaaccaaaacaaacctatactcaaaaaatttgatactaaggttcaatacttaaaatataaggttcttcgagaggtggcaagacatacatatgacgacgacaacctggtcaccagctttaacgacatagccaaaactattgtaaaggacaaagccacaatgcgctgctgtatttacaaagaaagagctatagtgggcgagagaatcggtatggccggaggcggacataaaaatgttgacaacataattgaggttctggacattgcctgcgacgagtgtcctgttgccggctacgaagttacacacatgtgccgcggctgtttggctcataggtgcgaggacgtgtgcaaacgcggggctatcacctttgacgaaaatcagaaagcgcatatcgacaaagacaaatgtgtgcagtgcggaatgtgcgctaaagtttgcccgtacagcgctattatacacaccgaaagaccatgcgttaaagcctgcaaggttaaggcaataagcatgaacgaagatcacgccgctgttattgacgacagcaaatgtatcaactgcggagcctgcgtatatcaatgtccatggggcgcgataactgacaaatcctacatagttgaagttgtggagatgctgaaaaaatacgccaacgacgacaaggtaaagctttatgcggttgtggctccttctatttcgggtcagttctcatatgctaatattaagcttggtcaagtggttaccggaatcaagaggctgggcttccataatgttgtagaagcggctttgggcgctgatatggtagcttatgatgaagctaaagaattagcggagaagggatttttaacaagttcctgctgtccggcctttgtagaatttgtggagaaaaacttcccgatgcttaaagagaacatttcacacaatccgtcacctatggcggctatagccaagtatatcaaaaagaacgaccctgactgcaaagttgtattcattggtccctgcaccgctaagaaagcggaaatcagaaaagacggtataaaagagtatgttgacagcgctctgacattcgaagaactgcaggcgttatttgacgcgcgtgagatagacctgactgaacttgaggaatcagagctcaataatgcgtcatactacggcaggatatttgcccgctgcggcggtcttgccgaggccgttcaagaagcactcaaggagcagggcaacggagactttgaactccacgccgtttcatgcgacggtattgacgaatgccgcacagcgctgcttaaagcgtcaaagggaataggaaacatcaactttattgagggtatggcctgcgtggggggctgtatcggcggagctggctgtctgacccacggaccaaagaataaaacagaagttgacaaatatggaaagttagcaatggaaaagagcattacagacgctataaaaaacctgtaaaataatgtcttaaatcttaattaaatcttgacaaaaaacctttgatgatatataatgcaagagtaagaataaatttgaattttacatagagaggtgactataatggcttatcaaatcaatgatgactgcataaaatgcggtgtatgtgctagcgaatgtccggtttcatgtatctctgaaggcgatgcaaaatatgaaatcaatgctgacgaatgtattgactgcggtaactgcgcaaacgtatgtccggttgacgctcctcaggcataattaaataaaatattgccagactgccgctttaagcggcggtctttttttataaaaaattagccggttccgaaacacggaaccggcgagtttgtatgatttaagctgattttattatctaaaagattgacctacatattgcaggaaacatattttccgattttatcaatagcggacttctcgtcaacgccgtctgtcacaaactttatagtatctccgcattttgttccgatactgagcagaataaatagctttttaatatcggtcgcatggtcgttctttacgacatacgtgcggcaatcatgctctccggcaagctttatcaagtcaaacgccggcttagcagctaaatcatactcgtttgtgatagtgtacgaaaattctttcataactgtcttccctcctgtactatcctgacaggttaacctgtctttcaaacttgatgattttattttttgtatctctattaaacaaccttttgattaaaaagtcaatcctaattctagccaataatcatttgtccacaaaaaataattttagcaatatttttgtaatgtttacattaagcttcagtaaaaacgtatgccgctactgaaaatttgtgaaacatccctaaatttattacaggtatattacactgaaattactcaattgtttccgcagggtatacttgagcgaaataaagtttgcaaatattattcagcaaaaagcaagcagattcggctcataaagatatgccaaaccgcccgcatattttaactattattttttccgcatattccgctgtaatcgcaataagcacatgggtcaaaccctctttttttgtacggactgaccgaaatctctccggccagtataccttcggctgactctacaattttttcttcggctcttttgagccgtttttgcatttcatccggcggtattccgcatttcggtgacatataacatttcttgctgccatagttcttatcaaacgctttatttacctctccatcgtccacaacccaaccgtttgcgctgacgtttctgtggacctcggtttcaaaagcttcgtccgtcgctgctttggattcgtctattataggatcgttcatctgcagataaagcatagccgcaggctcggtttcactctgctcacagacagcgtttgtatacacaagaggctgaaatctcacaccggcgtccgccagttctttatccagtttctttgctgatgacttataatccaccacgctgatatatcgttttccaccgattaccgcgctgtccgctctgtcgataaaaccttccacataagcggttccgttcctggtctctatcttaagcggcggaatatcgccgttttcaccaattcttatttcaaagccatatggacggaattcggattccctgaaaaatttcaccgtttcccacgcggttgttgaagcgataccggtcatacgcataaccaaatacttatagtaagctgaatttttatacataacctcttcgtttcccgtggctatttcactcactatgttccgcatctccgtctcgcactgttcccgtgttattgactcatagacagcgtcattttttgaggagaaaaaccgttctaatgatttatggagtatatcgcccatactcagcggatcaaaaaccgcaatgtctcttggtttagccagcagaccatatctcataaaataagagaaagcgcagctgttatacttttccattttggaagcgctcagcattatttctctgccgtacagttttgcgaccgaatttttggacagtatttcataaccgctttcggcggctttcagcctctctgcaaagtcagcgagccgtgcgccgtacttttcatcctcagcataaaaatcatagactgcacgccactttggtgcaaatttgcctacatctccgccgcatctgataaattcggattcaagcgctaaaaataccggttctttaccctccggcagctcaccgctatcgtcattcacattttctctttccatatcaaaaagctcattctcaattttggttataattttagacgggaaaagactttctccatcgtcagaggactttggagcaagcaaatataattcgtcagatggggatgataaaacattatataccaaaagctgctcgtcatgcgacttttctgacgctgtcattgccaaatcaatgccgtattccctcagcgcttctctctccgcatccgtcagtataccctcgtttccataacctctagggaaaacaccgtctgttaccccaaggactataaccaccttcgcatcagtgtttctgaacatatctattttgctgaacactgcgccgtcaatcgtctgaggagatattcctatttttattccgccgcaggccgatataaacaaatcataaaacttctcatacgttataagctcaccgcccataatttcagagattctgtcaagcgccgacaccacgctgttccatgtgcgcctatattcttcagcaagatataccataccattatccgaatactctttgcatatatcacgcattatctcttgatgacggcatctttccatatacttaaaaactgcttcggtaatttcactggcctttttacgtccacttattgaatgtttgaactcaaaaatcggagctaaaatcacgctttttattcggtttatactatcaatatcataagcgcgcttatctggattatacgtccactcattttcatcattccacatcgcgtggctggggttgacagaaagcagataattttcaaagacatccagctcttcttcattgctgactccggcgaatccgctccgccctatttccataaccctgtcataagaaaacccataggcaagtatttcaagcatgcttgaaatacatcttaaatatggattttcaagaatgctgcgccgcttgtctaaaaacacatttataccgagtttatcaaatacgagaggcatgattctggaatacacatctgtatcccttgccaatatcaaaaagtcgctttgcttatagcctttaatcctgcacagtctatgtataattgccgcggtctgttccacctcgtcaaaatgattttccggtgaatatataaagatattttccgggcttccgtcatatttttcagggtttatattaaaatagttgtcctgcaaaaatataaggtcagattttccgccgtctttgaccggcaaaatctcaggcttgctgacctcaatcccgcacgcttcggcggcttccgcaagctgtttgtatgtcaaagacgccgaactgaaaatactgtccggatgaacaaggtcatcgcatcttaaaaacagaactgtattactcatcttcttcatcagttcctgcagcacttgacactccagaggcgtaaaactcttaaattcggttataaacagacacgagtccgtttcaatttcaaagtcttttattttagggagtattattgacagattatcctccgcgtcagaattattttcgttgattaatctgctgtatgtatcataaaacaaagccaagtcttccagctttcgcttaaactcatctttctctaccttttcggaaacagtctgcagactttcaaaactcagaccataccgtttaaactccgacacaagccccgccatcagacttgaaaatcctctctgatgaacatttgatttaaaatactgcagtttatcttctataatctgcaaagctctgccagcaagaatttctctgcctgctccgtctatgtatctcagtctgagaggccccaggctgctgagcacaagattcgaaagccttgaaaaggtcagcacttccgccaaagtctgagccttaacgcccaaagtttctatgactttgcgttcggtaaaaacagaaaactgctccggaacgagcagatatgactttattccattttttatattcgtcctgacgctgtcaaacaaataaccgccgctgtccgcacgagccgttccatacactgttttaaacacaaaatcacccttttatccgttcagtaaacttaatatatctattatatctccagtcacataatccgctccggctgactttaacttctcttcactaaatgaggttgtgaccgcggcgcactgcattcctgcagcctttgccgattttactccgcttaaagcgtcctcgataaccaagcactcagctgggtcagcgcccagcttatcggccgcaagcaaataaggagcaggagacggtttcttctctgtcacatcattgcctgaaagtataaccgtaaaaaccgacgggtcaatctcggcggcttttagcgaggccataagctttctttccgcggcgctgctcacaagcgccagcgtgtatcccaaatttttcagtttttcgataagcggctttgctgatgggaaaaccttcatttctttgatgttttgttcaaaatttctaaacatttcatccattattttttctgtcagttccgctttatccgcccttttgcacggctcaattataaaatgctcttcgccggctccgatatagggtataaaatcttcttcagacgcttctattccgccggtcttaagagcgtcaagcgccgctttcataatgacaggttcggaattcactataaccccgtccatatcaaatataatatatttcattaaaacctccaaattttttccttaattatagcacatagtgacaatagtttcaattgttatatttttgtatttgaattttaaaagaatctgttgtataatacctgtttgtgtagtaacctataatatatataatatattaaggaaacagcattgtagaaatttggaggaatatagtatgcagctttttcacaactcacatgatacagcttatagaatgccatttggcgccgcagctaccggcagtaaagttaaacttgctttaaagataatttctgatacccagcctgacgcggttaaaattcggctttgggaaaacgaggaagaaatattttatgatatggcgcctaagaacagcagggaaaaccaaaaacagtccctttcgtcatcaggcagtgaaaatactgcagaaaacgagttctattataccgcaacagttcctatgcctgaaaaagaaggtttggtatggtattattttatagttgagacaggaggaaaagccgtttactatataaataataacgattctttgggaggagtcggacagacgcagaccgagccggcaaataacagctttcagataactgtttacgataaggactacaaaacacctgactggtttaaaggtcaaataatgtatcagattttcactgacaggtttttcggagaccacagtgacacaaatggagttatacccaagaaacgtaacgaatatataatccacagcgactggtatgagccaatctcatttaacgcccatcctttcgaaatggggcctgcctgcaacgatttttacggcggaaatttaagcggtataatagacaaactaaaatacttaaaaagtttgggcgttggcgttatatatctaaacccaatatttgacgcatattccaaccacaagtatgatactgcagattatatgaatatagacccgatgttcggaacaaatgaaaaatttacagctctgtgcgacgaggcggaaaaacttggaatcagagttattctcgacggcgtattcagtcatacaggcgctgacagcatatattttaacaagtatggcaattatggtaataataccggagcatacaaaaatccacatagtcaatataaagagtggtaccagtttactaactatcccaattacgaaagctggtggggctgcagtaacctgcccaacgtaaacgaaatgactccttcataccttgattatatattaagagatgaggattctgttataaaaacctggctaaaacgcggcgccagcggctggagacttgacgtagccgatgaacttccggatgaatttattaaaattctgcgccgggaagtaaaaaaacaagaccctgacgcggttataataggcgaggtttgggaagacgcgtctaataaagtctcctacagtattcgccgcgagtatcttttgggaaaagagcttgacagtgtaatgaactatccgtttaaggataatatgattgcatttctcttaggaaacatagacgctgaatgcctgaacgcgcattttatgtctatttttgagaattatccaaaagagacgctgtactccctgatgaatataatcggaactcacgacacaatgcgtataaaaactctgctcggcggtctttcgcaggactgcggaacacagaaattgtcctcaggaaacgaagaactcgcaacctatcggctaaaaatgctgtcttttgtacagatgacatttgtgggcgttccatgtatatattatggtgacgaagtaggaatgcagggaggcagcgacccgtttaacagaggaacttatccatggcgggctattgaccctgacctcagacagtggtatactgaccttggcgcactgcgaaacaattccgactgtttgacgcttggatattataaaacagtttatgcaagcggcgacctatatatatacgcccgtttcacaaaaaacggaaagaacgcatttggaaactgctgtaaaaacagtttggcaatttgcgctgtaaaccggagctttgaatccaaacatattgatattgacatttcagagtttggtgatttttcatttttctctcacggcatatcaaatcctgaaatagtgcctgtcagagatagtataatagaaatcgacgtcgctcccgtcggctgtgaatttttcataagcgccgacaaattttaacagcatttttatgctgcattggtaatataggaggaaaatattatggaagctcctgattttgagctgtcatctaacaataggacattacaaaaacataaggcaacctatacccaaataattgcttttggttttttggttatcatagtagtcggggcaggattactttcactgcctatttcctcaaaagataacacctggacgtcttattttgactcgctgtttacggctaccagcgccacatgcgtcaccggcttagttctatttgacacatatacgcactggtctgttttcggtcagctggttattcttttaatgatacaaatcggcggtttgggatttatgtccgttattacaacggtttctatatttatgggccggagaatttctcttcacgagagaaaattattgatgcagtccgccggaaatactaaactcagcggaatgatacagcttgtcagacgtatttttttcggaacattaatatttgagagcgcaggagcgattttgctggcaacaagattttgtcctgagatggggtttttagaaggtatatacaacgctatcttccactcaatctcggcattttgcaacgccggttttgaccttatgggaaaatttgaacctaactcttcactcatacattatcaaagcgatccggttgttaatctgacaatctgcggtcttattgttatcggcggcctgggatttatggtttggaataatataataaaggctaagctcgattttaaacactattcgctgcacacaaaaattgtgctctcaataactgcggttttgttaatcagttctacggtactgttctttattttggaaaagaataaaaattttgcaggattatccactgctgataaatggctgcactcattttttcaggcggttacacccagaactgccggatttaacactactgacttatcctcgctctcagagagcagttctctgcttacaaccgtgcttatgctgataggaggaagccccggttcaacagccggaggtatcaagactacaacttttgttgttttatttcttatggcgtttgcttcatcaaggaaaaacaataacgttgtaatctttaaacgccgtctcagcgacgacacactgaaaagagccagcgctatatcatcaatctatttaacggctgttttggtatcaacttttattatttgctcaatagagccatatacaataagacaaatactgttcgaagtcagttccgcaatcggaacagtcgggctttcaatgggactcaccccgtcgctgtctgttgtgtcccagtcaatactgatagtgctgatgtttgccggcagggtaggcggactgtctctcatgctggtgcttgccgaaaacagagagcctgtggctcttatgcggcctgttgaagatatattaataggataataagtttttatataagttttggaggtctgattatgaaatctatattggtaattggaatgggacgtttaggcaggcattttgcaaccaaaatgctggcgcttggtaatgatgttatgatagttgataaagacgattcgactatcgagcagttttcttcaatattcactgattcacaaatcggcgactgccggcaggaaggcgttcttcgggctttgggaataaacaattttgacctgtgttttgtagctatcggagaagattttcaggcttcactggaaataacatctatgctcaaagacctgggggcaaactatatagtttcaaaggcacgcgaggacagacaggctaagttcttaaaattggtaggcgcaaatgaggtagtgtaccctgagaaggaaattgcagaaaaactggctatgcgctataacgcaaataatatttttgactacattaaactgacaagcgaatactcaatatacgaaatacctgttgtcccttcatggatcggcagaagcataaattcgcttaatataagacaaaagtatgaagtaaatgtaataggaataaaacaggaaaacattctaaaaccattgcctacccctgaatatatattccagccaagcgaccatcttgttgtaataggcaaatctaaggatgttttcgcacttacgcaaaaaaaataggggatctttattacctgccggagtttccggcaggtttttaattgcaatttttttgtttaatttatttcttattatttttttaatgtaaaacttttttaaataaaaatcgtcttaataaagtaagcttttataataaaataatattcataggtgattatttacattttatttaaatatctaaattttactgtaatgtttatttattttattatataataaagtattgtgtgaaaaaaatatacatgtgtcaaggaataaatttaaaagaaacactcaagtgtttcctttttgggggtgatgtatatacctgacaaactttgtatataatataaaaagaattttaattgaaaagggagatttttgtgtcggaagaaaacgcatctaaattttttgagaattactttgatagtgaccttcaggagtacatctatgacattctgtactatcatcaaaaaaacagtcaaaaatataatgacttaatccacgagcaggagatttacaaaagctcctccgaagctgttagacaggtattagaacgctttattcctcaaaaacttagcgaagaagaatgtaaaaacgtcattaaatttatagaaaataataaccttatgatgattgaagaatgcaaagcgtcttaccgtcagggagttatagacggaatgaatagaaaaaagatgctgtctgatgaataaaaagaggggcgggcattacgcccgctccttatttcacctaaccttaaacctatcctaaactcaacaattttctccatcatccgtcattgcgtcatatcctgattctccagttctgactttgaccacatcccgtacgtcataaacaaaaatttttccatctccgatatgtccggtataaagtgttttaacagcggctttaataacatctgatacgggtactctgcacacaactatatccacttttattttaggcagaagagtagcctcaacaggtacgccgcgataatactcactgctgcctttctgcattccgcagccgagcacgtgcgtgagagtcattcctgttactccgatttcatttagagcgtgctttagaacttcaaacttagattctttacataccaccgtaatttttgtaatagtatgaccgtccttatcaactttcttttccgtattatccggcactctaattatcggcacagcagattcgggagtttcctgtcccactgtctctgatcttcctgtcaaaatagtcggcacatttggcataaagtccgcataagaagaggctaggccatgttcatgtatatcaagcccttctatttcttcttcagcactcgctctaagccccacagtatgcttaataattagaaatacaatggtcatcgttacagcgacccacgctattactgttataactcctaatgtctgaatacctaaaaagctgaaaccgcctccgtaaaataaaccgccttttgctgcaaacaaacccgtcattattgtcccggcagctccgcagcacccatgaacggccacagccccaacaggatcgtctatcttaagcttcttgtcaataaactccacagcaaacacaaccaagatacctgccacaataccaattacggccgctccgagcggcgtaacctggtcacagccagccgtaatcgcaacaagaccggctaaagcgccgtttagagtcatagaaacatcaggctttttatatctaacccatgtaacaaccatagtagcaactgtagcacaggcagcggcaagattagtcgttacaaaaactgaggccgccaacgacgaactatctgtatctgacatagctactgttgaacatccgttaaatccaaaccagcagaaccaaagtataaatactccgagcgcccccaaagttaacgaatgcccgggtattgcaacggatgtcccgtcctttttatattttcctatacgtggaccaagaatttttgcgcctaccagagcggccactccgccaaccatatgtactgctgtggaacccgcaaagtcatgaaaacctaattcactgagccatccgccgccccaaacccaatgtcctgaaacaggataaatcactgcgcttataaccatactgtaaacaatatatgcggaaaatttggttctctctgccattgctcccgaaacaatggtcgccgcggtggcgcaaaatactgtttgaaatattaaagttgcaaaattataatcaccgggcaaagcgtttgctccctggaaaaatgacggaaccgacagccaaccgccaaagacatttgctccaaacataattccaaaacctaaaatccaaaaaattggtgttcctaaactaaaatccatcaggtttttcataattatattacccgcgttttttgctcttgtgaaaccggtctctaccatagcgaaccctgcctgcataaagaataccaaagctgctcccagcagcacccacgcagtatctaaacccgttgccaaatccataatgttcataactttttcctccttatttttaattccggctgtttcgccgtgtatatataaaagaaaatggggcctgagaaaattactctcagaccccattgtctattatcttattatttactttttaaaacctataacttagaaatattttgccggaatattatattactcctggatagagaacagcaaatctccataggttgggaacggccagtattcttcaggagtataaatctccatttggtctgctacttcccgaacctcagccatatctttcaacactttttcattgtaaaatacagcctgctccaaaccttcttccatagcaagggcttcctgaacgcttgaatcaagagcttcaaccgtttcaaacagtctaagttctaactcagaaagcaatctaatcatcttttcttcaaacacgcaagaaaccgaaccgcccatttgtctcttagaaacaacagtatcgctgagttctttaacatatttcgcgacagcaggcgaaatatcgcgtcttgccatttcaagcatcgtctttgcctcaatattgatagccttgctgtaattctcaagatttatctcgtatcttgacagcatttcatcacgggtgagtataccgtgcttaacaaataagtctatactcttttcagtaacaaaagccggcaatgcttcaggcgtgctctttaaattgcaaagacccctgcgttcagcttcggcaacccattcgtctgaatagttattaccgttaaaaataatccttttatgttctttcatagtatctcttactatgttataaatctcgcatttagggtttgacgatttctcaagtctgacagcaaactggtcaagtatctcggcaacagctgtgtttataataaagttcggtcctgaaattgaaagagccgagccgggcattctaaactcaaacttattccctgtgaatgcaaacggcgacgttctatttctgtcggttgtatccttcgcaaaatcaggcacagcgtcgataccggagttcatcacctcattacatctgttctcaaaatcactgtcctcttcaatagaatccagcacttctttgagatcatctccaataaatacagagataatagcaggcggagcctcatttgcgccaagtctgtggtcgtttcctgccgttgccacagacgatcttaaaagatcctgatattcgtccacagccgctatcacagcggacaggaacaataaaaatctaggattgtcatgaggggtcttgccgggtttcagcaagttttcgcccttgtctgtcgaaatcgaccagttgttatgcttgccgcttccgtttattccttcaaaaggcttttcgtagagcaggcatttcataccatgtctttcagcaacctttttcattatctccatagtaagctgattatggtcagtggctatattagcttgtgtaaaaataggagcgagttcatgctgtgccggcgccacttcattatgttttgtctttgcaagtatacccagtttccagagttcctcgtccaaatccttcatatactctgaaactcttctcttaaccactccaaaataatggtcgtcaagctcctgtccttttggagccggagttccgaacaaagttctgcccgtatatgtaatatcttttctctttaaagctacctttcggtctattaaaaaatactcctgttcaggaccgactgtcgttataactctgtttacgtcagtttcccctatcaggtgaagaaccctgacagccgagttactgagagcttccattgaacgcataagcggcgtctttttatcaagcgcttcgcctgtataagaacagaatacagttggaatacacagtataccgtctttaataaaggcgtttgatgttggatcccacgcggtatatcctcttgcctcaaaagttgaacgcagacctcccgatggaaaactggaagcgtccggctcgcctttaatcaattcttttccgctgaactccataatcacgctgtcgataccgtcaggctgtataaagctgtcgtgcttctcagccgtaacgccagtcataggctggaaccagtgagtaaaatgagttacaccattttctaccgcccagtccttcattgcgttggcaacaacatcagcaacctcacgcgtaagaggcgtgccctcctctttggtcttcctaagctgtttgtaaattccatcaggaagtctgaccttttgcaccgagtcttcaaatacggcactgccgaataactcgttcatttgatccataacaaaacattcctttctttttaaaagtaaatagaaatgactaaataaaaaataaggcgctgcgagcaaaatactcacagcgcctttgctgtctacgggatagattatactacgctgtgagacctttgtcaagtaattttttgcctgacgacaattttttcagcacactaaacgaaatgcacattgcaaagtttatcagattttagcaataataacgttttaattatcaatatatatgtcttctgcttcgagcaaaatattacagcgcatttgctgtatataagtagaaacatcatactgtagtatggacatattatttaaaacgatatataaaattccgccttaagtatctttttaaaattgtatctttatatactgtccgctcagctcgccttacgtgccgcaaaagcggcctgccgatgctcgctatattcctgtctttagttcaatactaatataaatagctttgaatattaaaaatataaaattaatgtattattaaacttcggtagatgtgcccccactttttttagaaagtgaagattaaccatattaacctgttttattgtaactgcagtgtcaataatatgaatactcaaagtggtcgcataccactatatgaggtgcgtaggcgtgggatagcatcctatataaaattgtacctttatatactgtccgctcagctcgccttacgtgccgcaaaagcggcctgccgatgctcgctatattcctgtcctatagtttttaaataaataaaaaacataaaattgtaggtattcatcatactgcggaaggtgcacccaacttgtataagaacggaaaaaactcataaaaacgtccatttatatttctgccaactgctacttagttttataaacagatgtatcaactaaacccattaggtttttgctagatacagcttaatcctataatcagctgttttaactaacaatttttggtctttaatggcggccgcttaggtatataaacagcatgtatttactcgacaagttgttttaattcgtcaaacccaatactgcccgacagacacagacagaattatttttcgcaatatatttattatctgtaaaatttaaactatttcatacagctctctggcttcatccttttttacattctcttttacatttaagacccttatattcaaaggtttttcaccaaataatatttttatttcatctccgggcttcacgtcatatgatgctttgacagtgcgtccgtttacggaaacgcggcctccgtcgcaggcgtcattagccaccgtccggcgcttgattatcctggacacctttaaaaatttatccaaacgcattacaattttctccttagtgttttttcaaatagatttaattttctccattctcaaacttctcaaattcatctgtgaaactctcagtataagaagcgagagccagttccggatccacaccggctctgcggcaaaagtttaccgccgcaaacaagagctgaccgcagtccctctccggggcattgtcagcttcggctacatcatccgaaattacagacaaatttatctcattttcaaacttataaccggccttttcggcctttttctgaattttctcagctcgcataagcgccggcagatattttgatactccgcgcagttcctcagcaatgctgctctgctccctgtcagcacgttttatagcgtcccagtttttaagaacctctccgctgtccgctacttcgacttcaccaaacacatgcggatgtctgtgaataagttttcggcagatagcgtcggtaacgtcatttatttcatattctccgctgtctttcccgattattgcatgaaacactacctgcagcagtaaatccccgctctcgtcggctattttttcaggattcccgccgtcaattgcctcaatcagttcatacccttcctcaataagatttttctttatactctgatgagtctgctccctatcccagggacagccgcccggtgcacgcaaaagtgaaacaatttcaaccaggtcatcaaacgtatatttatctttcgtatctttaaaattcatcctcttcagctccaattattttatcagtttaaacttttccagtataccggctattttttcgcccttaggcatattcataatatcctcacgttttatagcccgaacagcgaaaatcattattacatagattagtccgcaaacaagaatttctaaaacagtgagaactcttgaagttggaagaataccggataaaaagtatccgcatacacccataacgccggccgcaatcaatggttttataagtatatcaagaggtttaaaccttatgtttgcaatacgtactatctgaacggtattaagcaccgctatgattaaataacagataaaagttcctataggcgctccgtcaatacctaagtacgggattgctatatagttgaaaattaccttggcggctccgcctatcaacatatttacaaccggataatagacttttccgtatgactgcagtattgcatttgtgacttgtactacggcaaccggtattattgctattgacaaaatgcttaaaaccacatgcgcattgtcgtcactaaacaacagacctaaaacaccgctggacagcaccgacattcctatagcgcacggcgcaccgaacagcatggcaattcttatagcgctctcagtgatgcttcctgcctcgccttttctggctctagccaaagctgatgaaattgcaggaactatactcattcccagagccacaaccaaggtcaacggcaggttaaacatagtcagagcttttcccgtgtacattccataaagagttgaggctttctgtgaatcgagcaccgcaccggtccatcctgctccaacagccttatcatagaatgacgtcccttgttcaaacataaatgcgtactcgttaaacacgttcggattagtaaccagcctacggcttattgttgtcatatctataagagttgtaagacttgaaacagacgcccctatagttattggtattgctatcattatcagttcttttaaaatggttcttttcggtctcagcttttcctgggccgctgtcatcggcgcgatatttttagcatgccgctttgcacctatagccaagcatatgtatattactgacagtaacaggaacgataaaagagttccggcagtcacaccaaaaatggctccggcagacgcataaactgtacgcatatgggcggtgtctacctggcgtgtcacaaaatctatcaccttgtccaaattcggaacaatagtcatccccataaagaacgacgccatgagcaagcctataaccatcttaccgctggactctattacttcagaacctgcggttgggaacatattttgtctgccttgaaaatagcctctcattgacgacgccaaagatacaaagaaaactgccggcgaaatagcttttatgccaagctctgcatccggaattccaaccaaacctgccagctgttttgcaaagacaaatagaattatactgccggccaatcctataacagccaaaaatgaaatcgccgtctgaaatactcttttggcatcagtttcatcatttctagccatactctctgcaaccatttttgatatagctatcggaaatccggccgtagcgactataaacataaacgtgtatatttgatacgccacattaaaataaccgcttccgtcatcgccaatcaaattaataagaggtattttgaatactgcgcctattatttttacaatcaggctggctatacccaaaactaaagccccctgcataaaatggcttccttttgaaccgccttttgtttcaactttagttgcttctgttttttccaaaaaatcctctcctcaatcgtaagttaaaccgctttatctgtaaattataaacttcaaaaagtcactctttttattatattatataagattttaaaaaacaactctgttctgtcatgattttataaatattatataaaaaaattattaagtttttataaccgaaacttctagtcttcaaacctccgaaacatccagctgaatactgtcccgttaacaaattttctaactgcccacgcaatgagagcggctaatgctatgccgcccaatacatcagtagggtaatggacatataaatacattcttgaaaatccaattaagcaagctaaaactataagcggtattcctatcttttttgaatatccaaaaattataaacgccgttgtaaaaacagccagggtatgtcctgacgggaaggagtagtccctgggaatcctaacaagcatatctatactgtcatttatccagcagggtctcattctgccgataagcggttttaaaatgatgtttcccaaaaccaagcacagcagcagtccaatcaaaaccgaagccccgcatcttcgatatttttcagtgcataacattatgactcccgcagcaatccaaagcagtcctccggaaccaaaatcggttatgataggcatgatgtaatccataaaagaactgtttaatgtgtttcgaataaattccaaaaccgcaaaatctatttttgtaataaattctatcaaatcctgtcctcctgtcataaataaatcacgcctagattagtttaacgccaaattttcgatatatcttgcaaaattatgtcatataatgtaaaattagttattatatgcgaaaggtatcatagtctatgaatattttgagccgccttgtaaatcttgtttatccatctaaatgcagcttctgcggaaagttaataagttttcaaaaatccggcattaatatatgcagtgaatgtatggataagataaaattctgtgccagccgcaagcgctgcaaagtctgcggcacgccgcttggaaaccctcgttaccgcctctgccaaagttgttttagaaaagctaagtcagatatatgcacctattataatggtattactgctgctgtggaatatgaccgaaattccaaaagaggaataattaatctcaaacacgcccgaagcctaagttcagtgaacacattttcaaatttaataacagcaatggttaaaaatgattttggcagcgtcaactttgattatatcacagctataccgccacggcgccagcgtatgaaagaaatagggtttgaccaaagcggtgcgctggcaaaaaagactgccaaactgctcagtgtaaaatattatccaaacctttttaaacgaatcagacaaaccagtaaacaaacagagctttctagctttgaaagacagcaaaatctgaacggagctttcggtctcaaaggaaacagcggtaatattaaaggcaaaaccatcctggttattgatgatgttacgaccacaggcgcaacattcaatgaatgtgcaagagtgttaaaactttccggcgccaaagctgtgtattgcgcggcaatagccacaactgagaaaaataacggtgacagagacagtttcacttaaaaatatataagacatttcttattttttctatacaaaaacggagcaaagcgaactttgctccgttgtggtggagggagatggattcgaaccatcgaagcaagatgcaacagatttacagtctgccccctttggccactcgggaacccctccatgtttaattagcgccgtttatgctgtctcgcgttaacgacctgactatgataacatatttagaatagtttgtcaatacttttttgaaaaaatttttttaaaaattaaaaaatttacatatcttataacatttgacagattttttctgcaactatcaactgtgcataaaactctacatcatattaaatataaaaaatattttccaaggtatttaatttatctacatataatttaagtcactatttatattaaattttataaggtgatttaatagtattttcttatcctaacacaaaggcgggctgcggcagtccgctttgcggctcgttatgcaagctgcgcggtcggtatattaaaatgttattttacttttatatttctataccaaaatacttattgtaaaatattttttgttgagttataatattagcataaaaatttctggaggtattattatatggaacttaatattaaagaaataatggatataatcccacatagatatccatttttgcttattgacaaaatagtagagtttgaggaaggttcccgagctgttggacttaaaaatgttactatgaacgagccgttctttcagggacattttccagggaatccaattatgcccggagttttgatttgtgaggctctcgcccaggttggcgctgttgttatactgagcaaaccggaatttaaaaacaagctggctgtgtttaccggaataaataattttaaatttaaacatcaagtggtgccaggcgagacgttaagacttgaggtagaactcacaaagttccgttcagtaatgggcaaagctgacgtttgcgcttatgtcggcgatgaagtagcggcaaaaggcgaaatttcctttgctttaatagataaagattaattagatacagaccgaaatcgtttcggtctgttttttacttaaacaataatttatatatctataaatgtcatgtttttctgttatacatttagtttaaataacttatgagttcataaaactcttaataaaataataactataaacctataaatcaaattttgtgttttacagcataacacatctatttggttaatgaattcaattgatttgtgttaatttaaaattatttttatttattttttgcatctccgcggctacgcacctaacgtggtgaccttcggtcaccctgccgatgtttgttatatacagctctatttatttttttaatttatatatattttaaatttatctttcttttatcatttaaaatattattcataccattctcgcgaaaccactcttggcaaattccggcggtccgtatttttcagtttataaggcaaactatatggacataggttaacggtgattttaatttgttagctgctattccgcggctacgcacctaacgcggtgaccttcggtcaccctgccgatgtttgttatatacagctctatttattttttaatttatatgtaaattgaatttatcaaaattgttatttcacaaaaaaatatttaaacaaagtgtttatgaagataaatttcatatcatatgatttcctactaaatttgtagcattttcttttaagcaaagttcacaaaattttcagctatttttttcaagaactatcacgactgtagatattgtgaaagatgtatcaatggttgtaaaaatctatttgacagagccaaatatttgaggtagaattgtgataaaataaactaactagaaatttgtttaaatttttaaattactagtatgaattttaggaggatgaatatggctgaatttacaaagtgcagtaatgaaaaagtaaacaagtggctggaagagcaaattgctatgtgccagcctgaaagtgttgtatggattgacggaagcgaaagccagcttgaggctctccgcgctgaggcagtatcaacaggcgagcttattaagcttaacgaggaaaaacttccgggctgttactaccacagaacagctgaaaacgacgttgcccgtgttgaggacagaacatttatctgtactccgacagaagaagaagccggcccaatcaacaactggatggaaccaagtcagatgtatgataagctcaaggctctttatacaggcgcaatgaagggcagaacaatgtacattatcccttattcaatgggacctgtcggctcacctttctcaaaaatcggtatagagcttacagacagtatctatgttgttcttaacatgaatatcatgacaagaatcggtcaggaagttatggacgttcttggaacagacggagattttgtaaaatgtctgcacgctaaaaaggacgttaatcctgaagaaagatatatcgttcacttcccgcaggacaatgcgattatgtcagttaactctgcttacggcggaaacgttcttctcggcaagaagtgtttcgctctgagaattgcctcatatctcggaaagcaagaaggctggatggcagaacacatgcttatccttggtcttgaaaatcctcagggagaagttaagtatattgctgccgcattcccaagcgcttgcggtaaaacaaatctcgctatgcttattccgccggaatatctccaggaaaaaggatataaggtttggacagtcggcgacgatatcgcttggctgagaatcaatcctgaagacggaaagctctatgctattaatcctgaagcaggtttcttcggagttgctccgggaacaagcgaaaagacaaacttcaacgctttggaatctacaaagaagaacaccattttcacaaatgttgctcttaacaatgacgacctgacagtatggtgggaaggtcttgacaagaatcctccaaagaactgcacaaactggctgggagaaaaggttgacggaacaacatacgaaggcaacctcgctcatcctaactcaagatttacagctccggctataaactgtccatgtatttcttctgagtttgaaaacccacagggcgttccgatttctgctattgtattcggcggacgccgcgctaaaactgctccgctggtatatcaagcacgcgactgggaacacggtgtgtttgtaggagctactatggcttctgaaactaccgctgccgctgccggcgctgtaggcgttgtaagacgtgaccctatggctatgaaaccattcgttggatacaacatggctgattattttggacattggctcgaaatgggcaaaaagctcggtgacaatgctcctgcaatattccacgttaactggtttagaaaagacgatgaaggcaactttatgtggcccggattcggcgataacatgagagttcttctttggatactcgaccgtgtttcaggcaaggctgacgcccatgacagtgctatcggtctgcttcccacagcttctgacatcgacacaacaggtctcggcatttctgctgaagaacttgacgctctgctcagtgttgataaagaagtttggaaagaagacgttgagaatattaaggaatactttgctcagttcggagacagacttccggctgacattaagaaacagcttgaaatccttgacaaaaatcttaacgactagttataaacaagccttaaaatattatataaaaaccgcaccggactattctgcagttccggtgcggttttgttattactatttctgaacttacttttgagccaataattcgtttctgcactcctcaagctcctctttatcttctttggagacttcaggatactttggattcatttttttaagcgtctttaatattatttttgaaactaagtatcttgtaaaccatttctgatcagccgggagcacataccattccgatgtttttgttgcggtttcgtttatcatatcctcaaaggccttctgatactcgtcccacaacgctctttcagataaatcatcagcagagaatttccaattttttgccgggttgtctattcgctctaagaaacgttccttctgcttttcagccgagacattaagaaatattttgattaccctatatccgttgtcactgagatattcctcataatttctaatatgcttataacggtttttaaagaaatctgcggcgggcatatctacgcaccgcttaggcattttataagttttttgcagattatgcacctttacaaccaacacatcctcatagtatgaacggttcataattcctatataacctcttctaggaacagctttttccgcccgccacaaaaaaccgtgagcaagttcctcagatgagggctgtttaaacgctgttacagacacgccctggggattcactccgctcatcacatgtttaatagtgctgtccttaccggccgcgtctatagcctgaataataattataagcccctctttggcttcggcatagagtttctcctgcaagtcttctatctgaggtttcattttttcggtttcgtcaattatccgttctttctccacatcatatggcttgcttgaggttggaacatcttttattttaattttcttatcaccataatatgcaaacttttctatattcatattatatcatcccttcctgcctaattctcttataaaaatatttaacatcataatagataattatactcgtattttatttattctacaccgttttaactctattgtcaatttaaccggctatgtacaaaatataaattttgtggtataattttatgatacaaaatttcaatcaataattccccataaaggaggaaaacatatgtctaaaactctcgtcttagcagaaaaaccatccgtcggaagagaacttgcacgggtcttaaagtgcagcagaaaatctgacggatgccttataggagacaaatatatagtgacatgggctctcggtcacttggtcactttggccgacccggaagcctacggagatgaatacaaaacctggagcctggaaacgctccctatgctgccgggaaagatgaaactcgaggtcataaagcagacttcaaaacagtacagcattgtaaaacgccagctgcgaagctcagaggtcagctccgttattattgcaaccgacgccgggcgtgaaggcgagctggttgcccgctggataattgagaaaagcggagttaaaaaaccaataaaaagactttggatatcgtcacagactgataaagcaataaaagaaggctttcagaaactaagagacggcaaggagtattataatctctatatggcggcccaggcaagggctgaagccgactggcttgtcggattaaatgttacgagagcccttacctgcaagtttaatgctcagttatccgccggacgtgtacaaactcctacactcgcactattagtgcagagagaaaatgagataaagaaatttgttcctaaggaatattatacaatagaagccgatataggcaaattatttgtttcctggcgcagcaaggacggcggactatccacatttgaccgtgaaaaagcagaaagaatatccaaagagattaaaggcaaaccgttcaagctcacatctttaagaagctctgacaaacagacgtatgcgcccatgttatacgatttgaccgaactccaaagagacgcaaacaagctctacggttactctccgaaacaaactctcaacataatgcaaaaattatatgaacagcataaggcactgacgtaccctagaactgattcacgctatttgactgacgatatagttccgacattaaatgaacgtctgcgtgctgtaaccatcggcgacacaaaggcggcggctgaagatatactccgcaggaaattaaaaatcaacaaaagctgcataaataacagtaaggtttcagaccaccatgccataataccaactgaacaaaaggttcctatgatttcgctctcaacagaagaaaagcgcatatataatcttgtggtcaaacggtttttggcctgttttatgggtccgtataaatataaacaaatcaaagctgaatttgagtgcgaaagtgagaagtttacagcaggaggcaaagaggaggtttctcttggctggaaagcagtatattcctcagactactcgtttgatgatgaagatactgctgacgcacaggaaaggaaacaaatactccccaaaatgaaatacagcgacgagtttatctgtaaaaacacattcgtcaaatcaggcaaaacaaaacctccggcacgatatacggaggcaacattactttcggctatggaaaatccctcccgttttgtaaacgacaaaaatatgaaagaatatttgggcggagggctaggaacccctgccacaagagccgatataatagaaaagctatactcctcattctatgtagaaaagcagggaaacagcatggttcctacttcaaaaggcgttcagctcatagatttggtgccgccggatttaaaagaacccctgctcaccgctaagtgggaacaagagttagaaaaaatttcaaaaggcaaaactcaaaagcaaaaatttattgctgaaatagaaaagtattctgccgaccttgttaagaccgttaaaaacagcagcgccgaatacaaacatgacaacatgaccaaaaagacttgtcccgactgcggaaaatatttgcttgaggtaaatggtaaaaagggaaaaatgctggtctgccaggatagggactgcggttaccgccgttcagtcagcataataacaaacgcacgctgtcctgaatgccacaaaaagatggagcttagaggcgagggtgaaaaaaagagtttctactgctcatgcggctacagggaaaaatactccgccttcaaggagcggagaggacaaagcggcgcttccaaaagagatgtgcaaaattatcttcgcaatcaaaacaaaaaagaagacgactccaacaatccatttgcagcagcatttgataagctaaatctataattattataacagcgcgcattaaaataatatgtttatcattgattaatcaggcgctcaataatattatttatatactttatcaactaaatcgcgttattttttgtaaacagattaatttcctgaacactcgggtttatatatgcaaaattattaaaatttttattttcgagatatataatcaaaaggcgggctgtaagttcctgacagctcgtcttcattattgaataataaaaatacacctaaataaaagttcatcacttttgaaataactcaaaccttttaggcagtataaggacatatttgggatatagtacaataatctaattacaaagtatagaatgattaaaaaagtcggtccggtttataaaacaaacagtttatgacaaacaatataaaactgcatctataaaaatggcacggacaggcaaaaaaattatttatgaaacagtaaaaaaatttggaatcaacaatatcagtacgtatcgttgaattaacaaatatgataaacatagttaaagtagctttcgaggcataaaaaacgcttttttaatgctgaatacgaattaaaaaactacaaaaatataaagaattaatactacaaaacaaatctttttaagtgcaaagtatgtatataatttcagttttataggaattttagaaaatgtgtgatatcaaaaaagtataccgtttcaaaaagtatcacgtttcggttattataaatatctgcgccgcaacagaaaatagcaaattgaaaatatacataaaaaagcattttaatattttcaaaaaacaggaacagatatggttcacttcccatttaccgtgttttgctgctggacaataatatataagaagcgcgtatcaaggattaagaaaaaataagacgtgactgccaaagacgctttttccaaaaatgtgctatttctattaaacctttgcggttattgttcggctattccggcgttaagcattactgttattttctcttaacagcaaaaaatatatctatttccggagactttccatcactcttctcagtatggtattcatattccatattcagcgccgaatatcggcttttaggcagccatttggtatagaaatatctctttgcttcgccaatagccaatccccacaaaaatcccagtttcggttttatagttatccttgcatattcaccgtttggaataattaaagattctaacccttttttgtctattgtgcctcccacaaacatttcaaaatccttactcagttcgttataattccttgacagcacgaaataggggaacactttactgcccggcgacgacacctttatgtgatattttttagaaagattctttatatcttttgaaactgtgctgtcatttgaatttttccatagaccatatactgtttgcttttttaaatttactacactgacttttatttctgacatgatctcattcccttttctttaccatttagaaacgtactgcaactaattgccgccgctatttcggcactcactgcactctttatcatgtatggaaattatgccgccgcactttgcgcaggtatatttattcttttgctgccgcataaagtattctatcccgcattctttaactaatctggtattttccattaaactaacctcatacctttttatatagctttgctccaaataatcaacctgtttacaaggataattcgcacattcaaaacagtatgttacgcccttattctttgcgcagtccttgatcttgcatacacggcagtgtttcggcttttcagaaccaattttcaaacatccgccgcacgaatttttatgagccaagtgcttataacaaactttacagttcattccgcatggagcaaacataaatggttcaatttcttcaggcattttcatttggcgatcacctttgcggtcagtctatttgtctaatattttgaccttgtcattgtcaataaatatagcttgtttatcgttaataacttttaaatccaaactttctgagtatttatcaattattatctgtgccgctttccccatctcccaatttttataatggggcacaacataaaaatcaacaacattaagtcctgaataatctttcagatccggcgcttttcccacattatccatttctgcagaataacctatatccggcgccgtaagtattgcgcctgccgactctcctatgtaaagcttgcctttgtttatttcatcggctaacaacttatcggttccggttctttttaattcctgcaacaagtagaacgtattgccgccggcaacatatataatatcatttttttctagtttacttttggcagtctcataagacgcgaaggatgtatccagctcatcaacagtcagccccaatcgcctcaatgtccacttgccgatttttacaaaaaaacctaacttttcagccttactggcagtagggatatatgtcacagttttattttttaattcaggttccacttttttcagtatacctgtaacgttctgaaacattgatactaataacatctttttcatactatccctctattcagctcccatatacggcttgtattatcgggttatcatggttcctataccgctgtcggtaaatatttcaagcagcagacagtgcggtatacgtccgtcaattatatgtacgttatttacccctcctgccaatgcttcaagtccgcctttaacctttggaatcataccgccggcaatggttccggcttcaatcatcttatatatttctttttggttaatttcatatattatatcatcagcggtcggcgagctttttattcccggggtgtctgtcaaaagcataagtttttctgcctttagtgcggcggctatcgcgcctgccacagtatcagcgtttatattatagcttcggccttccttatccactcccagcggcgcaaccacggggatatagtcgtcgttagccaaaaactccagaactttttggtttatcttaattatctttccaacataaccgatatcaacaattttgccgtcaacattggcatactgcttctcgcattcaattagctctccgtcaattcctgaaagacccaatgctttgccgcctttttgtgaaatcagcgaaacaatttccttattggtttttcccataagcaccatctgagccacgcgcatggtctcgtcatcggtgactcttaacccgtttacaaactcgctttgaattccaaaccttgtcaaagtctccgagatatcaggaccgccgccgtgtacaagcactgggtgcaaacctataaatttcagcaaggttatatcttccataaccttgtttttcagttcttcgcttatcatagcgttgccgccgtatttgataacaacagtttttccgttcaatttttgtatgtaaggcagggcttcaacaagtataccggcctttttaataagttcttccaatttctaatcccccaatctttataaatacattccggctgctctaagtcctgttccctcatcaataccgcaaattaaattcatgttctggaccgcttgccctgcggcgcctttaatcagattatctatacatgacactacaaccgcacggttcagacgcgggtcaacaaccactcctataccaacatagtttgagccggctacatgctttatttccggtaggctcccctcgtcatagatacggacaaattcttcactcttataaaattctttatatatatccaaaacttcacccgttgtcatctttttagtaagattggcataacaagtagcaaaaatacccctctgcatcggaacgagatgcggtgtaaatgaaagaactatatcctcgcctgataatattgaaagctcctgctctatttcagacgtatggcggtgggtggccaccttgtatgctttaagcgattcatttacttcacagaatatattaggcaggctcgcgcttcgcccggctcctgtcactcctgactttgcgtcaattatcaaattttttgtgtcaacaatcttggccgcggcaagaggggcaagtcccataatagaacaagtcgtataacagcccggattacctatcagtctatgggtctttatttcatctctatgaatttcgcacagaccataaaccgattcctttaaaacctcgggcgccgagtgaggttctccataccacttttcatagacgaccgggtcattatatctgaaatcgccgctcaaatccacgattttcaaacccttttcatacaatgacggaataacggtcttagaagcgccgtgaggcaaagctgtgaagacaaggtcacagctgccggctatatcgtcaatatccagcgctgtacagcataaatcgcatattcccttcaaattttgataaacatccgagattttctgccccacaaaactttgcgaaaccactctcactatttccgcctccgggtgcgcggtcaaaagtctgacaacttcaattccggcgtatccggtagcgcctaatattccgacttttatcattgaaatcaactccgtataaatttttaaaaacagcttctgataggcattgtgagcaaatcgacagcattttatttcatgtttagcattatactatcaaagacaaaatatatcaagtgaaacccaaaaatttgtatatatttacccgaaagtatttaagtcttaaaaatagctatgcaaaatcactaaaatcttaatttcaaatttggtgaaatacgcccttttcttattctcacaattatgttagaataatgaggtagttaaattctgtgatacatattgattcagaacaaatataaaatcaggaggtcatttaaaaatggcaagtttaagtcttagaggaatttacaaaacatatacgggaggattcacagctgttaaagatttcaatcttgaaatcgaagataaagaatttataatctttgttggtccttcaggctgcggtaagtctacaacacttagaatgatagccggtcttgaagaaatcaccgagggtgaactttacataggcgataagttaatgaacgacgtcgttccaaaagacagagatatcgctatggttttccagaactacgctctttacccgcatatgactgtatttgaaaatatggcgtttggtctgaaactcagaaaaacaccaaaggatgaaattaagaaaaaggttattgaagccgctcagattcttggtattgagcatttgcttgacagaaagccaaaggctttatcaggcggtcagagacagcgtgttgctctcggacgtgctatcgttcgtagccctaaagtattcttgatggatgagcctctttcaaaccttgacgcaaaactcagagttcagatgagaacagagattggtaaaatacataagaagcttcaaacaacatttatctatgtaacgcatgaccagacggaagctatgacaatgggtaccagaatcgttgttatgaaagacggtattattcagcaggttgattcaccgtctaacctataccaatatccttgcaacatgtttgttgccggcttcattggttctcctcagatgaacttcttgaacgttacagttgactgcgcttctaacggcacatatctcaaatgcggagatttctcaattaaacttcctgaaggcaagggcggcagatcagaaattaagcagtataacggcaaagaagttattatgggtatcagacctgaagatatttatgatgaccctgcattcatttcaagtgttcctgactgctgttcaaaggtaaatattgaattggttgaaatgatgggtgctgagacttatctttatttcaaaattgccggaaatgactttactgcaagagttaatccgcgttctacagcaagacacggggataccgttacggttgctcttgacgcaaataaaattcacttatttgataaagatactgagaatattatttctcactaaaaatatttaagttaaaagatatgagccgctaaaattttagcggctcttttattatgccaaatttgtcaatcataaattaaaccaatagtttttataattactatatttagtgttagtttctgtactaagtaacatcaatatttttaaggcggccaaaaccgctaatcaacttaatcgagtgaaaataattgactgctgtataataattataatctaattgtaacaaaaaaacaaagtacatacctgctttgttggcgtaaaatatattaagaccgccaaatggcaaggacttatttaattgtctttttctatgtattttttatatatttataaagttatcattccactattaatatataactatcttaattgtcttattttcttattgtcttaactaattatcaccttaaagccttatttccgcattgtttcagcatccgaacatatttgctgcctaaacggcacactgctatttaaacccaaattttatttttgttatactcaatattacacataccgttttattagcacaaattaaagttacagaataaattttaaaagtatatttttatcccattattataattaccgcgtcatttttaagattaattattatctttttcattgcatcctcgtctaccgcaatacaacctgaagttcccttttctaaattatcggtgcagtgtaaaaatattgctgagcctttgcccggaataccatcaatattatagtctacagcaactgcatatttatattgaataggataatctgacaaatgttcggcgctggcaaaatcaactttgcctttccctatatctaccagctgattatagtgttcagaattgaaatcatcgacccaatacatatcgtcatttacctttagataattattctctgttcccggattatccgcgcacccaaaaattgttcctaatgtgaacattcctgacggagttatattatcaccttctctttttatatcagctattccgcccgctcccactgaacatggatacgaaaacagccttatccaccggttatctctcttttcaaacatactcagtcttccgttatgctcgccgtttccaacaactgtaataatctgcttcctatccttcactgaacttatactttcgattctgcctcgcattattatcccctccgtttaattatatgcagttattactttaatgccctgcaatgagctaaaatttaattaaatcagcgcattttatttacttgaatatgtactgccgttgtgataaaatatatagataaaaaacttatccggggtggttattatggaagaaatttcaatacatacaaaacctgttaaaatcggaaacattacaataggcggcggaaataaggtcgctatacagtcaatgacaaatgttccgacttatgatatagaaaaagtaactaaacaaattaacgatttggcctcagccggctgtgatatagtaagattttccgttccggacaaagaaagcgctgaagccgttgaagaaataaagaataaaacaaacgttccgctggtagctgatattcactttgactaccgcctggccttaatgtgtattgagcgcggaatagacaaggttcgtataaatcccggcaacataggcggtgaagaaaatgccgaagcggtagccaaggccgcggcagccaaaaatattcctatccgtatcggtgtgaatgcaggctcacttgaaaaaggtctgcttgataagtgcggcggagatttgccgaaagcaatggtcgaaagcgcaaaacggcatgtcgaaatcctaaaccgttttgactttgataacattgtgctgtcaatgaaatcctccaacgttgcggcaactgtcaaagcatacaggcttgccagccaaacttttgattatccgctgcatcttggagtaactgaggccggaacgattaaacaggggatagtaaaatcctccgttggtattggctcgctccttgttgacggaataggggatacgataagagtatctctgacagacgaccctattttggaagtatccgcggccaaatcaatacttagagctttagacttagacgaaaattatatcgaagtagtttcatgcccaacctgcgccagaaccaaaattgaccttatttccatagccaacgctgtcaacgacgcagtggaaggaataaataaaaatctgaaagtcgccgttatgggctgcgttgtcaacggccccggagaagccaaagacgcggatataggaatagccggcggtgatggctgcggcgtattgtttaagcacggagaaataattaaaaaggtcagtgaagacgagattattccatgtttgattgatgaaattaataaaatggtttaaccgaataaaatgaagttttaaaaggaagatgataaaatgagcccaactatactggatatttttgacagggtgaccgtgcttgaaaattacgcgtcgcttttgtcaagctatgaaatagtatcctgtaatatagatacaaattataataatataaagctttacttaaaagggcagaatctgctgccaatcccggaaacaaaagcgtttataaacatgaccaaacaatcatatggtctgaacgattttgaaatatttgttaagtatcccggtcttgatttttcagaccaatatttttcttacctgctggacgcttttctcgcaagccatgatgctggaaaggcatttttaataggagccacaggggagcttaatgataatactctcattgttaaaaatattaacggctgtgagtccgctctgaataacatgaatttttcagcctttatgcgtgagcatattgcgtttggaatcgatcttaacgttacggttaatctttgttttgctgaaaccgaccgagaggaatatctcaagcggcaatcagagttagaatctaagcttgtggccgcttctatccaggaaagaagacccgaaaaggcggcggctccgtccgaatcgccgaaatcattcggaaaatacatagatgaaaacccgacgccaataattaaactgaccgaagaaacaaaatattgcgttgttgaaggggaaattattgatttcgaaagcagagacatagtccgcggtaaccgttccaacacctcaataaaattttctataggtgatgacgaatgggcaaccacctgcagcgctttcggaaattctgaaaaaatgaaagccctgaccggaatgcttaaagagggcaaccgtctcaaggtagcaggaaactatgaatttgacgagtatcttcacagttttgtaatcaaagtgacctctgcactgctgataccggctccgcctgtcagacaagacacttatcccaaaaagcgcgttgaacttcatatgcatactaaaatgagtgctatggacgctgtttcatccgttgggtctttggttgacagagcggcttactgggggcatcccgctgtcgctataaccgaccacggagttgcccaaggattccctgacgccagaaaggcagcaaaggctcacaaaggtctgaaaatgatatatggaatggaaggctatttaatcgacgacatagattccaaacgccttaacgacataagggaaatgaggaaaggaacatacataatctttgacttagagactaccggtctgagttcagaccgtgacagaataactgagataggcgctgtaaaaatcagagacggtattatagtggataagttctcgcagcttgttaatcccgaaatggaaatatcggagcaaattacagaactcactgggattaccaatgaaatggtcgaggataaaccaacgattgataaagttctgcctaaattccaaaaattctgcggcgacggtataatggtcgcacataacgcaaaatttgatatggggtttatatactcaaatgcgcgccgcctcaaattatattttcctaataaaacaatggacacgctggaaatgtccagaaatatatttaaaaatgaaaacaatcacaagttaaatattatatgccaaaggctgggcgttgagcttaacaaccaccatagagcggtcgcagacgccacggcaactgcctactgcttcatgaaaatgatggatatgaccgcatggaaagacgcggcggcggctgaagctgagattcccgaactggataaagacaatccggtcgtgaagaccaggaaatatcacattatacttctggcgcaaaactatgtcgggctcaaaaacttataccagttaatatccaggtcaaatctggactacttctataggaagcccggaatacccaaaagtctgctccacaaataccgcgaggggattatagtaggctcagcctgtgaatccggcgaactttaccgggctattataaataagaaatccgaagacgagctggcagagatagcaaaattttatgactatcttgaaattcagccattaggaaacaacgcttttatgaagcgtaacggacaagttagagatgataatgaactaatcgagataaacaaaaagattgtgagcattggcgacaagataggcaggaaaactgttgcaacctgcgacgttcattttcttgacccgaaagacgagatgtacaggcgcgtgctgatgggcgctcagggctttgaagacgctgataaccaggccccgctgtacttaagaaccaccgccgagatgatggacgagttcagttatcttggcgacagggcagaagagatagtaattgacaatactgttgaaatagctgacatgatagaagatattcagcctgttaaggacggctcataccctccgaccattgaaaactgtgagcaggatttgattgatatgtgtcacagtaaggctcatgaaatctacggcgacaacctgcctgaaatagttgaggagcgaatggagagagaactgggctgtattgttaaatacggatactcggttatgtatatgattgcgcataagctggttaaaaaatcaaacgacgccggctacctggttggaagccgaggaagcgtcggctcctcctttgttgcattcttgtccggtataacagaggtaaacgcgctctgtcctcactatgtgtgcccggactgcaagtacagtgaattttatgacaacggcgaataccccaccggtatggacatgccgaataagacctgtccgaaatgcggcgcgccgctcagaaaagacggtcttacgataccgtttgaaacatttttaggctttgaaggcgacaaggttcccgatattgacctgaacttttcgggagaatatcaggcgacggctcacaaatatgtcggcgagctttttggagacgggtacgtattcaaagccggtactatcggcaccattgccgacaagacggcagttatgtttgcaagaaaatattatgagaaaaaggaaatagtggcccctgacgctgaactaaaacgtatctcaaagggtattgtcgatgtgaagagaacgacaggacagcatcctggcggaatcatagtgtgccccaagaccatggatatacatgactttactcctgttcagcacccggctgacaaaaaggattcagacattataaccacacactttgatttccattctatacatgacaacctgctaaagctggacatactcggacacgatgacccatcaacaataagaatgctggaagatttgacaggtataaacgccttggagattcctcttgacgataaagaaacaatgagtttgttcagcagcactgaggctcttggcatcaaacccgaacagattgacagtaaggtaggaacctttggcgttcctgaatttggaaccaactttgtccgcggaatgctggttgacactatgccgacaacctttgtggaactgcttataatatccgggctttcccacggtactgatgtttggcttaacaacgcgcaggaccttgtcaagaataaaaccgcaaccctgtctgaagttatagggctgcgtgacgatattatggtataccttctgcaccatggtcttgaacccagcatggcgtttaaaatcatggagtttgttagaaagggcagagccgcaaaagagggtatgccggaagactttgaagccgctatgcgtgaaaataacgtgcctgaatggtatattaactcctgtaaaaagataaagtatatgttccctaaggctcacgccgccgcatatgtaatgatggcgttcaggatagcctacttcaaagttcactatcctgccgaattctatatggcctactttacagttagagccgacctttttgacgccgctattatggcgcacggagaagaaaaggtcattcaggaaatgaaaaaaataaaaataaaaggcaactcggccaccgcaaacgagaaaaatctgcttactatattagaaatatgtcaggaaatgtatgagcgcggtatcgactttgcgcccgtagatctttacgaaagccacccatataaattcggaaaaaaggatggaaaaatacttccgccgcttaacgcctttgccggagttggaacaaacgctgccgaagcaatagcgtcagcccgtgaagacggtgactttatgtcaaaggaagatttaaaaaacagagccggaataactaaaacggttatagaagttctcggcgaaaacggggttcttgacagtctccctgacagttcgcagatttcgttttaaaatatagatattaaggagaaattgatacatggatatactaaagaagcttgcagaggagtttaaacttaacgcttggcaagtagaaaacactgtgaagctaattgacgaggggaatactatcccatttatttcgcggtacagaaaagaagccaccggtgagcttaacgatgaaatactccgcgacttaaacgaaaggctcagttatctgagaaacatggaggaacgcaaggcggacgtcaagcgcattattgaggaacagggcaaactgaccccggaactggctgatgcaattgataaagcagaaaagctcacagagattgaggatttataccgcccatacagacccaagaggaaaaccagagccactatagccaaagcaaaaggtcttgagccactctcagtgctgatatactcacaaatgctgagtgatgaggaacttgaaaaaagagcggaagactttgtaagcgaggaaaatgaggtattatcaattgaagacgctttgaacggggctatggacattattgccgaacaaatatccgataatgctgaacatagaaaaaaaatccgagacataaccttccagacgggcgtgattacttcaaaggcaaccgatcccgaggctgaaacagtatatgagatgtattatgatttttctgaaggagtatcaaagatagctccgcacagagttctcgcaatggataggggcgaaaaagaaaaagtcttaaatgtatcaatcataccggacacagagaaaataatcaattacttaaaacggaaagaacttgacggcggcgaacacaaatattttgacgccgctgtggacgactcttataagagacttattgccccgtctatagagagggaaatacgaaacgaactgactgaaaacgctcaggaacaagcgataaaaatatttaaaacaaatctgcacaatcttcttatgcagccgcttatcaaggacaaggtggttatcggccttgacccgggttacagaaccggctgtaaagtcggagtagtcgacggaacaggcaaggttttagacacaggggttatttatattacacattcggaagcgcagaaaaaatcagccgtcgaatttattaaaaaccttataaaaaagcatgatgtggacttgatttccataggaaacggcacggcttcgaaggagactgagatatttacagcagaactattaaagaccataccaggtacaaaagttaaatatcttataacaaatgaggcaggcgcctctgtgtattctgcttcaaaactggcaaccgaggaattcccggattttgacgtcacccaaagaagcgctatatctattgccagaaggattcaggacccgctggctgagcttgtaaaaatcgaacctaaagcgataggcgtaggacaatatcagcatgacatgaaccaaaaacgactggccgaagcgctcggtggcgtggttgaggatgcggtaaacagtgtcggtattgacttaaacaccgcatcagcacctttgctcagttatgtttccggcataagttcggctatagccaaaaatatagtcagttaccgtgaggaaaacggaagatttactgacagaaaacagctgaaaaaagtgtctaaacttggtcctaaagccttcgaacagtgcgccggatttctcagaataacagacggaaaaaatattttggacaacacgtcggtccatccggaaagctatgacgccgccaaaatgctgctttctgagtgcggtttcaaggatataagcagcgatggtctgaaaaacctagatgaagcagtaaacaagcacggccttaaaagtcttgcgcaaaagttagatattggagtccccacattaaaagatataataaaagagcttcaaaaacccggccgcgacccgcgtgacgatattgaacagccgttgctcagaagtgacgttatgagtatagacgacttaaaacccggcatgataatgaccggaactgtgagaaatgtaattgatttcggtgcttttgtggatataggcgttcatcaggacggtcttgttcatatatcccagctgtccgaaaactatgttaagcacccgaccgacgttgtttctatcggagacattgttcaggtaaaaattattgatgttgacaccaaaaagaacagaatcagtctgtcaatgaattttaaagactaatataattgaaccacagttatatattttactatttataaacaatattcgaaaattaccaatgcacatgggtatcaaataaaaaccacgaaatgtataggacaagccttaactaatatctaaataaaaaatatattggaggtaaaacaaatgcgttttgataatactacaatcagaattctggttcggaagaattatggagaatgttttgacttttacacggataaaatcggcttaactccggtatggggtgacagaaacggtccttatacctcttttgccgtagaaaaagacgctccgccttgctttgcaatttttaacggagaaaatatgagtatgtttaaaggctataaccagcccgactgcaatacacagcccgatacagttgtgaccgttatcccctcagatgaccttgaaaaagattataaacgtctgaaagaggcaggagtacagtttttaggagaaccacagactgttgaggattggggtatgcgctgcacctatttcagagaccctgaaggcaacctgtttgaactcaatgatgccagcggaatataaaaaattatttaaacataacagacaataatagcagttatggaaattcagaaatatatagaaataatccttaaaatttttattcgcagtctagacactataatatttctgttaaattaacttgtccttaaaatataaaacaatagactaaacaccttatgctttcaataaattgtataccaaaagtcagaactatttggaaatacaacatgaacgtatacggtgtttttcatattacagtataaataaatcagcctattaattattaataaacgtataattcagcgcaaaaacaataaaaaaatttatatagtttcttgcatataggcaataaaaaataaaacttctttataatgatgtgacccacgaaagttagaccaaaaatctaactttttcgtgggtcaccatcattatttaaagtcctattattatacaccgtcaaaataaattagatgaatctcccaaacttgcggcagtctcctctttattctgcttttaatatatggtgtatccgttctttcctctctgcttggtacggtacagagcagcgtccgccttctcatacaatgttttaaagtcgtttccgtcttccggagcaatcgacacgcctatacttgaggacagcttccactccttttcctctcttacgcagttgaagtttaaagctgctgataactctctcgctttactttccacccatctggtatcaggaatcggtataaacgccacaaattcgtctccgccgatacgtcccaatatatcaccttccctgaaatggttccttataacctcagtaaactctttaaggcagtaatccccaaatgagtgaccaaattggtcgtttgcctgtttaaaattatctatgtcaaagataaagaacgcatataagtcctccggcttttcagataattcagacataatagaatgctcagtcgccgttttagtaaggaatccggtcatctcatctgtcgacgcccgacgctctatttgtttttccgcgtctatattcttacgatatgtgaacatgtgaatacagttatcctcttgtgacaggaatatatatgcgtcaatacgcatccaaaaatagtccatatcattctgagtaatcaaaaagtcataacttaaatgattatttccgctctcaaattctttaatgacgttttcgggcgaaaacgttgaaatatatccctctctgtattcttttttaatctgcttctcagccacaactttaagcgccttgttatacggcagaccctttgcgcccaaactctcaaagtactgttttgtgggagcgtttgcataaccatttttagttatattcaattcataaatattgtcataaagttcctcagtagcctttttaaatattgcctgacgttcctccatgagttctgatatttgctttataaacttaaataatactaaacttattattatcaatacaataataatgattccgataataataactgctgtcaaataaagtcttattttcatctgaccgattatacttccggtgtcctgctcaactaccaagtgccatgacagctccggaatataacgtgaagccacaaaacttttttcctgactgttatcctcgttttcagtccaaaattctaaattactcttatcgctcttccattcaagcacctgactgcgtatagattccctgtcgtattcgctaaaccaatcggttctgccataacctgtatgcgtagtggatatttcgattatgccgtcctcatttaccaaacaggttctcagatgatatttttcctcataggtcttcaaaaagtccttaagatagcttattcttattcctactccgactactcccaaaaccttgttattctctccgtatatcttgcagtttacaaaaacagttatggcgttgtctgcgccgtcaacttcatcgttatcaacatttaacgaatattcctgcccgcttttcatcaaatcataataccaaacgttttcaggattatcctcagtcagaacgcggtctacgccgttaaagttataataccgtttagtcgcttcggagacaagaaagacagagtcaaaattatattttccgcggtatgtctcaaggtaatttttcagtgttgagatatattcctcattattcatctgctttgtttcttcattaagctgggtaaccaggagagtgtctctcgacatagtaagcgagatgttaacaggacgtgtgaacatagtagtcagctgataatatatactttcggccgtcagagacgacacctgctccacattactgagagaggttctgtaattggcgttataactcaaaaatgaagttataatgaagccaaataccaatataatacttaccagcaggttaatttttaaaagttttctccctttcaacatcctgcgcccccaattctgatatactgcaccaattttttaaaactattataataacagtatagcatatatcagtaaaaaagtcactaaaaataaacaaataaaaacttatattaaatttattttttgctgagagcacaattttaatcatcgatattttcacgctcgaacagcggagagttaaaaaagtctataagacttataccaaatccctcgctgattccatataaaacttgcagcgtcacactccgatgtacacagtgcagaactgaacttattgttgtcataggaacgccgctccttaagaataatccatattggtttattgattgttccacacaaagcatacgaatacgtttggcaacaatttgatttaattgcatagaaacacccctttaatattttatataaagcattataacttataaatatttgcagatactttgagtacacgatattttttaaaatttttacaatttatttgttgaagcggttttcaaacctcggtagggtggtcgcagaccacctcgttaggtgcgtaggcgtggaatagtatattagtataaacttttagttttatatcctgcccgcgttgctcgccttacgttccgcataaatgcggcctgccgacgctcactataaacctctttatttgttaatatttctttaaatattcaggaaaactgtttagattgtatatatataaatattaaaaaaatcttttagaaaaacttagagataatacattaaaaaaacttgaagactacgataatcattaacttttatcttattaatattttaatggattttcaaacttcggtagggtggtcgcagaccacctcgttaggtgcgtaggcgtggaatagtatattagtataaacttttagttttatatcctgcccgcgttgctcgccttacgttccgcataaatgcggcctgccgacgctcactataaacctctttatttgttaatatttctttaaatattcaggaaaactgtttagattgtatatatataaatattaaaaaaatcttttagaaaaacttagagataatacattaaaaaaacttgaagactacgataatcattaacttttatcttattaatattttaatggattttcaaacttcggtagggtggtcgcagaccacctcgttaggtgcgtaggcgtggaatagtatattagtataaacttttagttttatatcctgcccgcgttgctcgccttacgcgccgcataaatgcggcctgccgatgctcactataaacctctttatttgttaatatttctttaaatattcaggtaaattgtttagattgtatatatataaatattagaaaaatcttttaaaaaaacttagagataatacattaaaaaaacttgaagattacgataatcattaacttttatatattaaactttttttaggttttggggacaaacctcggtagggtggtcgcagaccacctcgttaggtgcgcaggcgtggaatagtatattagtataaacttttagttttatatcctgcccgcgtcgctcgccttacgctccgcataaatgcggcctgccgacgctcactattcacatacttttattttaatatttatataattttcacctgctataatatattaacatatatgatttttcgacatatattgatattgagcgtaatgctcaaattattataaggtaggttatagaaatgggaataattagttcaaataaatctataggcggcgttagctccatcaattgtcagggttctttaaatgttacaattggaatcaccgccgcaccggatatcaccaccaatccaaccgatattgttttagtccttgaccgttccggaagtatggaaggtcagccgctcgctgatttgaaaaccggcgttaatacttttatagatattatctccgacgctaccgacggaggtcccggtcaaattggttccggcagccgtattggtatagttagttttgcagatacggcagttcaaaataccggacttatcacttctgtatcaaatttgaaatcagctgcagcgtcactgacagccgacggactaacaaaccatggcgacgctttcacacaggcaacgtcgcttttgagctcatcaaccaacaaccgcgtcattgttatgtttactgacggtgaaaccacaaccggtccaaatccgtctccaattgctgccgctgcaaaagccatgggaattacaatttacacaattggtctcgttggcaatggcggaatcgatattaatgctctgaataattgggcgtcagaccccgatataacacatgtttctattgctcctgacagctccgaactggaacaattatttgcagatttagcggcaaatatatcggttcccggcgcaactgatatagtaataaatgaggtaataaatcctgattttattattaccggcactccaacagcttcggtgggcactatatcaatgctgacaggaacatcattccgatggaacattagccagcttggctcaacttctaccgaaagcgcaacggttagatttactattaagcataacgccactacttcaggtattaaaaatattgaccaatctatttcatatacagataatgagggaaatactgccagctttgctaatccttctgtttttgtagattgccagtctgtagttcctgttgacttatgctctacaccgatagacataccgctgaccggatgcaacgagtttatacagtttgacgcaggtaatttggagctaaatgacacaggccgaattttacagctggatgttaatctgctaaatgtttgtcctgacaggcgcgttgctttagcggtcattttgacagaattagatccaaacaacgaaattcagccccgtggtatgaaaacctttgtcattccgccgcacggattaccaacttgttcagatgtgcttgtttcatgcatacagttcattctgccggacgagggctttggactttgttcagaacgtgttgtcagagctcagtttgtagcaaattatattgacaataattattcgtgctgttccggttttacgacagcttcttagaaaataggaaattatgaaaggggaacggttatcccgttccctttttttgaaaggagacaaatatgcaatgccgacagacctttcctgcaaagcattaaataattgtaataatactgacgctaaactgaactataaattattttgcacgaatagcattcgtatgtatgatattacttacggcggctgcagcggactatcgcttgtccccggttctgcaacaaacatcagcaatctaatttgctgccgtgacggtgatgaaatcattttaccgggatgcgaatcatttgtaactgaacaaaagacagttcagatagataacccttgccaaacattatgtgtgaacaactgtgcatgtgatagttgtttgatttggaccagtaccaataaaagagccagcgtatcaactgctaaaataggagataccataacctatacagtagagtttacaaatcactcggctgtaatgctggacacagttcaaatttttgacacgcttccgcccggagtttccgtaatccccggttctatacagccagcgccaaaacctcaggaaacactgcaaaccggaatttcaatcggcagtctgccgccgggtcaaacagccgagctaagatacagcgtgtctgtagactatgctgtatcctgtgatatagtaaaccgagctttcgtcaggtattgctatttagactgcagcaactgctgcagatatggattaggaagctgtaaatgcagctctgttagaattgttaatgccggacttaaaatcacaaagcacgccgacaagacctccgtgtgctgtctctgcgaggaaatagtctacactctgaaaatatccaatccctgcggtacagcgcttactaatgtagttgtctatgataatattccgcaagggttatgctataaaacaagctcaacaataaaagacggatgcggaccaacaaatgaaaacccgcagaatggtatttatattggaacgttgtgtcccggtcaaatttccacagtttcatttgtattatatgtttgctcagagccatgctgcaaacaaactcctgtcacgtttgacaacacagcatacgtatacggaaacatctgtgatgatgtcatatgcgcagaaagcaattcctggactgtcgagatgaatagccgatgcttgtgtcaatgcatacaaaaaaatatttcagtctgtgatttaaaacgtttcatactatgctatgtttataatacaaatatggcctgttatgacattgggcgaacaaaaagggttgttgcaggatttggaatatgcataaaatatattgactgcaatggaaaaataaaaaaaggatgctatgaagaccacatatcatttaataatttgccgaatcgttttaatcctcacagttacaacgtaaaatttaaaaatctagtttgcagccttgattgtgacggaaaattaaatacaaaatttgaagcgaaactgcgttactgcttgatatagaattataatttgaggagcaattttatctggtgtaaaaatttatataaaaattttctattaaataacaacaaataataacggttttaaactttacaacattataaagctaaaataaatttattaaaaaatcgaacccataaacaacagagataatctgctgtatgcggttcgatttgttatagcttggccagcgtgaataatttaaatatattttgacttacccgataactcctaggctctcaaaatctgctgtttttcttaaaaagaagaagtaataaagaatatgtaaatttttgaataaaaaacgcagcaaagttctctttgctacggtatggtgcgcctggagggattcgaacccccgacctaacggttcgtagccgttcactctatccagctgagctacaggcgcatactctttattcaaacaaccatattattataacacctttttctattaaaatcaagttcttttaattaacttttataaattaatttttcacaattattcaactaatattaacctatcgttcattaattattaacaataaagtgttatgatataggtgtaaagaaaaataatacattttattaataaggataagccaacttgaatatactacttgagaaaggagtgaactatatgttagttgatgttgaaagcggtaatgtaactctattactttcgttgattacaggagccgaggaatctgttatcgaagaaatgcttatgaacggtattatgccggcggatgtggctaatcaatttggtaagtatgaagagtatcgtgcttttttgaaaagtaatattgccgcaaggcttcaggtcttgattgataacgacgaaataactgtcaaagaagccaatgaactatttaaccgaatcagtgaaaattgaaacctaacctatgataatatttgataacaacatcacggatcatataaaaatataatataatgtaccggtgattttacatatataatgatttaaacatactacaggtgaaaacatgaataagataaattatcaactggaacttgataagataattaataaaattgaaggtgaaaatacaacaaaatcgctgttattgcatagctgctgcgccccctgcagcagctatgttttggcgtatttaaataaatattttaatataacggttttttattataacccaaacataacaaataaagaagaatatctaaaacgcaaacaggaacaaataagactgatttctgaacttccggcgataaataaaatcaatatattagacgctgattacaacccggaaaagttttttgaaatttcaaagggtttggagaactgccgcgaaggcggcgaaagatgttttaaatgctacaagctgcggctagaagctacagctaaggcggcaaaagaaaatagtttcaattacttctgcactaccctcactataagtcctcttaaaaatgcacagaaaatcaatgaaatgggccaaatgttgggcgatgagtatcaaatttcatttttaccttctgactttaagaagaaagagggatttaaaaagtcaatagagctttcatcccaatataatctttacaggcaaaactactgcggctgtatatattcaaaaccaaaagagtaattttgttttacgtgaaacattttgtcgtaaaaataaaatggcttaaaaaatctatagtccaatttttgtataacaagaaaatataaaaaaaccattgtatttaggctgtgttaagccttttacaatggtttttattaatcttccataacaatgactttttaaagtctattttgcagctatactactagtctggcttaattactgtctcgccgcccatatacggacgcagtatctctggtattgtaaccgttccgtcctcattctgataattctccagtattgcggctgttgttcttcctatggcaactccgctgccgttaagcgtatgaacatactgagccttctctttaggtgagtttttaaactttatgttcgcacggcgcgcctgaaaatcttcaaagtttgagcacgaagatatctccacatatctgccgtagcttggcatccaaacttctatgtcgtacttcattgccgctgtaaatcccaaatctcctatacatattttaactactctataaggaagtttaagtccctgaagaacatactccgcctcggctgtcagctcctccagttccttatatgaatcctcgggttttgtgaacttaactaactccaccttattaaactgatgctgtcttatcagacctcttgtatcccgtcccgcgcttcctgcctctgctctgaagcaagctgtatatgcgcagtatttaaggggcaggtcatcgccgtttaatatctcatccctgtgcatatttgtcaccggaacctcggctgtcggtactaagaaatagtcggtatcagcaactttgaatgcgtcctcttcaaacttaggaagttgacctgttcccagcatactgtttctgtgaaccataaaaggaggaaatatctcatcatatccgcggcttgtatgtgtatcaagataataattcataatagctctttcaagtctcgctccgccctttttataaacatggaaccttgcaccggtaatctttgccgcgctctccggatcgagaatacctaaatccttgcctatatcccaatgagcttttggctcaaaatcaaactttgtcggctccataaactttctgatttcaacattgtcctcatcggtgtctccgtcaggaacagtctcattaggtatattagggattgtatacattattgtctgaattttttcgtccagctcacgaactttttcatcgtctgccttgatactatccgataattctttcatttgggcaaaaatttcggttgtatcctttccctcttttttgaactgtggtatctgtttagatactacattctgctgagcctttttttgttccacgtcaaataataactcgcggcgcttattatcaagctccagcaatccatctatgtccacctcttcttttcttcgtgccaaagcctttttgatcctatcggtttctgttcttattaacttaatatctaacatttttatcctccatctttacattattactgagcgttattttctgttataggctgctttgtagcgctgtcaatacttaaaattttacacaaagcctcatagtatcccctttgaatatcatcaaatgatgaagaatccaaagaaataatatcctgttttgcgccttccgtatctcccatatttatttttgtccaaatattgctcattacctcaagcactgctttatactttgtctcttcctccatcttggaagcatttttttcctgctcttttttcagcttatagttttcttcacgcaaatttacaagttcattttcgaagcttgcgtttgtctgttcagtttccataaccctatttcctatttcttcttcgcggttatcagccatagctgctattaaaataataataataacacaaattatcataacaactgcatatgttgcaatattgctcttcttttttgggttagtattcttttcagactttataaccttctcacttttagaactttcagattttataacatcttcctttaatttattctctttttccaatgtcattcctcctctcaaaaaccaatttcttatataacagctaaaaacatgtccagaatcaattttgccttcttttaatataattactcaggacattattcaaatttgcaaattaggtataaatttttaagtcggtttttaaagtaaatctactatatttcatatataactacttttttagttcaaataatattctttccaaatcgtccttagaataatactctatttctatttttcccttatttgcaccttcactaattttaactttagtgcccaatctggaacccaggtcattttctacctcagaaaaatattttttcatcattccggttacttgtttagtttttggtttctttttattttctgaagtatcagacacaagtttttcaacctgtcttacattcaaacccttttctattataaatttggctaattcaaactgttcgttatcatcagttatagataaaagtgctcttgcatgcccctgtgatagttttccatcaatcaccatttgctttactctttctgataaattattcagtctgagagagttagcgaccgcacttctgcttcttcccactttctccgctacctcttcctgcgtaagttcacaagtctccatcaaacgtctgtagccctccgcttcctcaatcggatttaaatcctcacgctgcagattttctatcaatgcaatttccattacagccggctcgtccaattcacgtatgacacacggaacctcttttatttttgctaattttgcagctctccagcgcctttcaccggctactatcatataagttccgtttatatttggcttaactaaaattggctgtactataccgtgagcggctatagaactgctcagtatttccaatttttctttatcaaacgtttttctcggctgatttttatttggctctatatcacgaacttttatcatttttatactatcgctgtctgcgatttctgtatcggatagatcggataaaaaatcaaacccttcgctgctcttctccgacttactgtcatcaaaaagcgctccaagtcctctcccaagcccctttttagattttgaagccatctgctcacatccttataatattttgtttcacattaaacaattcattatttcttattttttttaattacttcggcagccaattttttgtagcactcagctccttttgaatttttatcataagcaataacaggcataccgtaactgggcgcctcagacagtctcacattcctgggtataacagtattgaatacagttgaagaaaaatattttttcacctcttccactacctgaactgataggtttgtcctgctgtcaaacatagttaaaagaactccttcaatacttaaatccttattaagacttttcttaactcgcttaattgtcttagtaagctgtgataatccttcaagcgcataatattcgcactgaattggcataatcacactatcacaggcggtaaaagcatttagagttatcagactgagtgacggcggacagtcaataataataaaatcatatttatcctttacattttcaagtgcttttttcaacttatactcacgattatcctgttcagccaaatcaaggtctgcaccggccaaattcatatctcccgggcatatccacatatttgtatattctgtctctattataacgtcttcaataggtgtatcatttactataaaatcatagctcgaatattcagcgtcctcaggttttataccaaccccgcttgtagcgtttgcctgcgggtcagtatcaatcagcaagactttttttctttttaatcctaaacatgcgctaagatttatagcagtagtcgtcttcccaactccgcctttttgatttgctaccgcaataatttttcccataatatgtaccatccttcttcactgtcactttattataacacacctggttatattttcaatagcgtaaaattaaaatttatatagatatatggcgaatttttatttattttgtttcatatgaaacattttatatcattttcatatagattctgcaaaatttttcagagctttgtacctatgactaattttatttttttcatttgaatcaagttctgacaatgtgcactgtttttcaggataataaaatatcggatcgtaaccaaacccgcttgttcctgctctttttttagttatatatccatcgcattcaccgcggaaaaactgtgtattttctgatacatttttatcaattaccgctataacgcagacaaattttgcagtcctgttttcctcattaatttctgacatttcaagcagcaatttatctatattttcatcatctgtcgcattttctccggcaaaacgggctgtaaaaattcccggttttcctgacagcgcatcaacacataacccgctgtcatccgcgatagtgggcaaacctgtggctttaaacacctcaatagccttcttttcagcattttcttcaaaagtactaccgtcctcaataatttctaaatttcctattccggcctcatccatagtctgaatttcaaaattttcacctaatatttcttttatttcatccgctttatgcttgtttttgcttgctaaaacatattttttcattttatattactcctgtgtttcataaattatattcgatagttcagctatttgttctatatttagtttttcaccgcgtactttctcattcaattccatttgttttaaaacgtcgattattttatctttgctaagatccaaatatgggctgcctgataacgagttcaccagtgtttttctgcgctgtgaaaaaatagattttacaattttaaaaaattgttccttatttttcacatcatattttggcttatcatataatttgagatttacaacagtcgatgtcacctttggctgcggtgtaaaacaatgaggcgaagccgagcagattattccgggttcagcatagaactgaacagcaaccgaaagagcaccgtaatcctttgttccgggctcggcaagaatacgggctgcgacttctttttgtatcattagagtcattgaattaacaggaagttcactttcaagaaaattcataataattggagttgttatataataaggcagatttgcgactacagtaaagctttcattgtcgaattcattttttatcaactcattaatattcagctccaaaatatcactgttaatgagattaaaattatcaaaatcggacattacatcatttaaaattgggataagagctttatctatttcaaccgctgtaactttctttgcttttaaacaaagttctcttgtaagagttcctgctcccggtccgacttccagtacatttgtattctcattaatacctgaaccgctgacaattttgtttaaaatattctgatcaattaaaaagttctgtcccaaactttttgaaaaagaaaaattatatttattgagaactgacatcagttcagattttccggatagcttcatataatacctcaatattatttaaaatttttattttattttaaaaaataaattttcgagtttaatttaataattataacatatatatattaaatatgcaattccaaactctgtttaagtcatataaacgaacacgtgaatcaaagatttattacataaaataataaaaatacttaaattttgattattattcaaatttattattgctattttgggaaaagtttgctatcataattaaatataagagtttaaacagggagggggaagatataaaatgaactttattactgagctcggaaattctttgtattcaacatttgtactggataaccggtggcaatggtttttgagcggtcttggctacacgcttttaatttcattttttgctgttttggtaggtctggtcattggtgttgtaatggccttcggcagattatcaaaaaataaattattccgcggtatctctggtttatatattgatattatccgcggaactccaacaatggttcagctcctgataatttacttcataatttttgctaatgtcaatattgacagatggatggtcggtgttattgcattcggtattaacagcggcgcttatattgctgaaatagtaagaggaggaatcctatctatcgaccagggacagactgaggccggcaggtcgctgggactaacgcagcgccaaacaatgacttacataataatacctcaggcggtcaaaaatatacttcctgcgctgggaaatgaatttattgtacttataaaagagactgctgttatcggtatgatagccaatatagacctcgtaggcgccgccagaaaagtacagagtttaacctatgattatgtagtgcctatgctttcaattgcacttatttactatgtagttattaaaatagtgagcatattgctaaaagcatttgaaaataaattgagaaaatccgatatacgatagaggagggctgcagattgataaaagtaagcggtctaaaaaaaagtttcggtgatttggaagttttaaaaggtattgatcagcatgtatgcaaaggtgaaaagatagtgcttattggcccgtccgggtcaggcaaatctacttttcttcggtgcctgaaccttttggaaactccaacggaaggcgaaatacttattgagggtgaaagcataacagcccccaaaaccaatgttaataaactgcgtgaaaaaatgggaatggtttttcagcatttcaatctttttccgcatctcagtgtaattgaaaatataactttagctccaataaaagttaagaaaaaaaatgcctctgatgcaaataaaaaggctatagaattattaaatattgtcggtctttctgataaagcgaattcatatccgggtcagctgtcaggaggacagaaacagagaatagccatagccagagctcttgcaatggaaccggatataatgctttttgatgagccaacctcggctcttgacccggaaatggtaggagaggttttagaggtaatgaaaaatttagctaacgcaggaatgactatggtagtagtaactcatgaaatggggtttgcgcgtgaagttgcctccagagtattatttatggacgacggaatggtagtggaggaaggaagcccggaaaaattatttgggaatccacagaatcagcgcactaaagattttttgggcaaaattttgtaaataattataaaatataaattaggaggaagaagaatgaaacaattttttaaaagagcagctgcaatagctgcagcagcagtaatgacaatgggggttctgtctggctgcggaagcaaagacgacaaattaacgcttggtacaaacgccgctttcccgccgtttgaatttacaacaactaatggagtagtcggaaattatgacggtattgatatatgtataggcaaggaaattgccggcagcatgaacaaagagcttcaagttgaggatatggaatttgacggtctaattgccgcagtaaaatcaggcaaggtggatatggcagtagcaggaatgacaatcacagaagaaagacaacagagcgttgatttttcagatacatattacacagcttcacaggttattattactaaagccgacaacactgatataaacagtgcagaagatttaaagaataacaaaacagtcggcgttgttctcggttacacaggcgacagcatagtaacagaagatctcgcaattgatgacagtaaaataacaagagcaaacagaggaattgatatagttcaagacgttaaaaacggtaagcttgatgctgttgtaatcgacaaagctacaggagttgccctggcacaaaaagaaggtctcaaatttgttgaagaccctgaggtttttgaaacagaagaatatgcaatagctgtaagaaaagataataaagagcttctagaccaaatcaacaaagttttggctgaaatgaaagaaagcggaaagattgacgagctttcaaagaaatacaatcaggaataaaacagccaatatcagaccaagatgtcgcggcttgccgcagatatcttggtctgtagtataaaataatttattttggcaaaaatataaaagttgaacagtgcatttttatttatttaaaaatatttacttataaaatataaataaattaaaaaaacacttgacaatatgatttaacagtgatataatttaaaagctgtgtaagtagtcacgccggagtggcggaactggcagacgcccgggacttaaaatcccgtgggaagtaattcccgtaccggttcgattccggtctccggcaccacacagtaacaatatatcgcggggtggagcagtctggtagctcgtcgggctcataacccgaaggtcgttggttcaaatccggcccccgcaaccactaaaaaagcatgtaagtcataagacttacatgctttttgttatgtttttttactttataagttttttatatactgttaatttaaaaaaatattaataacattgactcaataataattatagagtataataaaaatgtattaataaaagatttggagactaactattatgaaaaaattattcagtttaattttgtcattgttattatcgctgtcttttcttccagcaaaagcggcgaaaattggggatatagccggagaagttatttatacagatatttcagcatatataaatcactatcctatatcggcttacgcatatgacggaggtatggtagttgtagccgaagatttgaaaaatttcggttttgatgtaaattataatgatgatacaaggaatcttaacataactccaaatacttctattaatactcttaatgggatgggaacggtatataaaaatggtgcaagattaggaaaacacttttcggatgcgctatacagcgatataaatgtttatttaaatggatcatggataccttcatgtgcaataaacggatatatgataattaaacttgaagatttagcaaatgaatacataggtacaagttttacatgggataacagcacgcgaagtgcaaaattatggcttgattgggcaggtataactgaatataaacctctcacagaaaacccggattatattgattattcaaaatatataggaagttattttataccatcaagcactacgcggccctggtttggagatagtctcgaaatatatagtattgatggaaatacaatcagttttgattatcaatattctaaatccggtcatgctgtcggatacactgcaaatctcggccatttcactgatgcaaaaaatgcttttgctactggtacaagtggttacggagatgtcccacaatggcagtgggtatatatagaatacagatttaagttttataatgatcgaatagtcttaacagttggagacacatataaaaacgatataattttttatttgaactaagggggaaaaacattatgaaattaaaatctaaagtgacagttcttataatatcttttataatgattatttcatcatctttgacagtattagcatacgatgatatgacacaaaatttattaaggattacagattactataaccaaggatattattatgaaatgcgtgatgaaataacatgggcaagatgtcttaatttatctgaagaggatattaatattctgaatacatggtctgaaatcgctgactatgttataataaacatgaacaaagtggataataatttgaataaagcgcagcgctactgtgacaatggtatgtattttgaagcgaaaaatacacttgacgatttagctaacacgatttctatgacgccatcacagcttgaaatttggagcgccaaaagagccgatgcgattgccggtatcaatagatggaacgaatatattaataatggatataattatccgagcaatataagatatgtaatgcagcaattgaatgttccgttcggaaaaaacattacatatactgtttcttcatcatattactgggacggagccggaatatatttagtatatgttgatttttatcaaaatggaaaactatgtgcttgtgcggaagttgacgtaaatacctatgaaataatgtccggtattttaaaataccgtgggatttaatttaataaaaaaaaataacactaaatactattctattatatattacctatatttgatacatgaatatcagtaaacaatacaatatttcagtatctgatcttaacacatataattctaaaaaaacataaaaaaaatgataaagaaattaattaagggagaaatttatagtgaaaaaattattagcaattctagtatcattatctctattttttagtataacaacattcgcttacaatcaattttgggatgtgcctcatgattattgggcatataattatattacagaactttcaaacagaggaattattaatgggtatgaaaataatgccttcagtcccgaaaacgccataacacgagcagaattagcaaaacttttagttaccgcaggaaatattgatactaaaaatgtttatgtacacttagcattagaaaattgtgaggatttaagtaaaaatcattgggcagccgtatatatggttgcctcaaacaaatatttgccgcctgtaaataaagatggcataacgtattattatcctgaaagacttgcaacacgtgaagaagtgatagtaagtattgctaaacttaaagggataaaaaagactgacacttctattttaaatcaatttacagatacgaattttatgtcaaacagttctaaagagtacatagccgccgcaataaataaaggctggataaacggatatgatgatcatactatcagaactgattctgcaatatccagagctgaaatctcagctctattgtgtagagcatttgaaattgtatcagataataaaatttattaatagattatttttaatacaattacgataaaatagtggtttgtctaattttgttgagctttgaaaaggtgctgtaatatattttatgtttataagcagaccaaatatatataattaaaattattgataataaatttatagtgactacggcaaattataaaaaaaacaataattttaaataatatgactgtttataatatgtaaaaataaataaacacaaattaaatcatattatttaatataaatgcaggagaaaataattttaagtaactaatagatccttattttaaattataaacgcatatgatttaagatattcacattataataataatactcacaattgtttaacatattgtttataatatagttgttttaaaaattattactacaaaaataccctgcatataaatgtagggtattttgtaaatttaatatattttatataaaattattttatattaacataaatcgcaccagatattattccatgaaattaaggatattctctgagcatatatctgcggcggcatactgtttgtcataataccgtcaaattcaatccgaacaaaatttccaggtctaaaccggcgtgctctgcgcgttatcacaacaactctctgacggttttctatgtctaatacaaacaaacggtcattttgtacgcctattactatagcccgcataatcaattttaacacctcctttgcccataatataattatgctgcttgaaggcttattgaaccatgtccttaaatatattagataaatatgattttttatatataaaacaaacttaatagttaaattacttaaaaaacaatccactatgacaataaaggtaatgcacatattgtaccagcaatgccaaaatgaatgatgaaattaaaaaaaataaaaaggagagttatatatgaaaaataaacaatataataaattattacctatatttaaacattattttaaacagattatcgaataggataatggacttaaagtcaaatgcagatcttttacaggtatatttgagactgatactgagcctgaagatgatgattacattggtgagtatgctgccgccgttcacgaagttaagatattgcataaaggaaacgataactctgttaaaatatataataactgtatagaaataacattaaaaaatattcctgaaaaaatttctaatgaaaatggcacaattatttggaatagaccttccgaactaaagtctctttaatagattaagcaaataatttgctgattactattgattgagttttaaaaaaccgcaccaaatttatttaattataatattatttattttttaatggtatgcttagcataaaagtatatccactgttaagtccttgttttatattaatattaccgtctaatttttttaaagaatcttttatagaatttaaccattcataatttttattgtaattcttatttttattacttgtttctataccttttattataaaatagatttcatctttattagttgtaaacttatttacaccaatactaaaaacaagatattccgcttcttttaaatattttacagctcctacaaaaaatttaataagcacatgttccagttctttttcattccctatataaaagtcattaatctctgaagaaacttctattttataaaaatttttttgttcttcagatataatttttataagatttttaagtcgaagaataagtttttgcatatcaaacaaattttcttttatttcaagtttattaacctctaaatcttttttctcttcaaaattcataatatccatccctttatacttttaaataatataactacataattttgattatgttgtatctatttaaataattgaataactatgtgactaatttcaatattattataacataattgtttatttgattacaagttaataatataaaattttacatattttttaaaatagacaacataaataagcagaatgaatatatatttttattccgcttgtttgttatgcaaaaatttattaaattgtatctaaattattatttataaaaaataataatagtttttgttataaaaaataatactttatggcaagttattacaacataatcaaaattatgtgataactaagttcatcttatcaagctgtcttaaatgaaccgaaccgctttccatggtatatatccgcgttgtatttatatttgtatgtcctaaaatgtcggctaaccttgataaatccttttcttctgaataatatatttttgcaaaaagatgcctgagattatgtggaaaaaccttttctgattttactcctgacgcttcacataaatttttcatctctctccatatatttgaccggtctattggttttccgctctttgttataaagatacatccctttgaaatgatttgtctttttatatatatttttaaaattttacaaagttttacaggaataaatattattcttctttttcctttattgttaatttctgctttacctttataaacggcttcaacagttatataacttaactcagagactctgattcctgtagcacatatagtttgtataataagagatagtcttttattatttaatttttcagcagtcttaatcaatctaaaatattcgtttttagataattcttttttctcatcgcaaaatatatttttctgaatctttaacggttttatttttaaatcgccccaaccgttatattctaaaaaaccgttagcggcagctaatattgtattaacgcttgaagcggaataactttctgccaatagctttttccattcaataagcagtattttactcaattctttttcttcaaaatatttatacattctttttatatcttgtatatactttcttattgttgacaagcttttttcttgttccattaaataaacttcatattctttaattttctctgaccttattattctttcctcagcagttatcatattttttacctccttaaatacttattttatctaaaataattaaaatacatactaaagatctaatatgaagtcaatttcatactaaaatttttattttgtcaaaaaaataatcttaaaatttgataattttttaaaaaaactaatataaaaaaacaattatttaatttgaaatacaaaacatactgttcttatacaacttaattcaaaacataaaaaatttttattaaattatgaaattttttaaaagtactattgacaacactaactgtatatgttatagtcacagtataattgtatttaaaaaagtcacagtttataaataatgaataggagtaacaaaatgacgggaaatttctgtgtagctgttcacgcattagtctatctaaaccataaaggtgaaactgtatcaagtgaaaaattagctgaaaatatctgcactaatcctacgcgcgtccgaaaagttatgtcaatgcttaagaaaaaaggtcttgtaaagtcgcaggaaggccttgacgggggttatattttatcagacaaaaaagaaaatatatctctaggtcaaatactcgacgctataaatgagaaaactgtctgtcttaattggcatagcggcgatgatgatatggattgtttaatagcctcaggtatggccggaattatggacaatattgttgaaaacttaaattattcatgtaaagactatctggataaaacaacaataaaaacaattgacagcaaaatatttaaataaaaacacggtatgttaatccatttaagtataattaattataactaagataacaatataaaatgttatgctaatttaataaattaactttaaaaattataataagaggtgaatttatgccattttcattagagcagggaatttcaattataactgtattttttcaaggtattataagttttttctctccgtgcacacttccgctaataccactttacataagttatttggcaggaggaagcaaatacaccgacagcgatggaaaaataatttatcccagaaaaaaaatatttattaatactatatgttttgtattaggaataagttttaccttttttctgctgggctttagtttttctatgctgggtcagttttttaataaatataaatatgtttttatgataataagcggattaataatgataatattcggattataccaatttggaatatttaaacgccgtaatattatagaatcagaacaccgcctgccctttaatatcggaaagtttgccatgaacccgctgaccgcgtttgttttaggtttcactttcagtttcgcatggacgccatgtataggtcctgtactcagcagcgtattattaatggtatcggcttccgattcaaaacttatcggctttttactaataggtgtatatacgttaggatttattataccattcctgcttgtcggtctttttaccggcactgtacttgatttgtttaaaagacatcagaacatagtaaaatataccgttaaaataggagccgttttgttaattttaatgggaataatgacaataacaggatttatgaacggtattaacagttatatagcatctgtcacaaatacaagcaattctgaaagacaaaccgaaaataataattctgctgaaaataatataacctaccaaacaccaaatcctgaaataactcctgcccctacaaaaaaacctaaaaagaatacctcactggctcctgactttgaattaactgatcaatatgggcaaactcacaaactgtccgattataaaggaaaaatagtatttataaatttttgggccacatggtgcggatattgtaaagaagaaatgcctgatatagaaaaattatatcatgaatatggagaaaacagtcaagacgttattatattaggcgcggcaaatccgcgttcagaaaaataccctaataattcagatgtcagtcaggaagaaattcaagagtttcttgatgaatataacttaactttcccggttctcatggataaaacaggagatgtttttaaatcgtacagtatcatgagtcttcctacaacttttataatcaatagggacggaagcgtttttggatatatacccggcgctatgtcggctgataatatgaaagatgctataagcaaagcaatgcaataaataaaattcataaactttacaatatatctttgatatgatataattcaccataatataacaatatatggaagtgataaaatgttaaaactacaaaatataaattggaccctagaaaacggaactcaaataattaaagatataaatcttgatatacctgatggcaagctgatagttataaccggaccgaacggcggcggaaaaacaacgctggcaaaaattattgccggaatagaaaagccgacttcaggaaaaatatttttagataatacagatatttccgactatgatataactgaacgtgcaaaagccggaataagctatgctctgcagcagcctgtcaggtttaaaggcataacagtcagaaatctgcttgaactcgcttcaggaaaagaattgtcaatagatgagctctgtgaacttttaggaaaagtagggctttgtacttatgattatatagacagggaaatcaattcttcactttcaggaggagagataaaaagaattgagatagccagcgtactggcaagaaaaactaagctgactatttttgacgagcctgaggcaggtatagatttatggagcttcaccggacttataaaagtttttgaagaactaaaatcaaaacataaaggcacgcagataataatttcacaccaggaaagaattttggaaatagcagatgaaattatagttattgccgacggacttgtcagaacaaacggtcaaaaagatgagataatgccaatattgctggaaaatgaatatggacagcactgtcctgaaggaaaggaggaagtgtatagtgaataaaattactgatgaacttttaaaaattgtttcagactttacaggtgaatttaaaggcgcgttcaatatcagagaaaacggtgagtgtgcaggaagacaatcaagtaaaaatattcagattgaatccaaaaaagatgctcccggtcttgtaataaaaattgctgaaaatacaaaagatgaaacagtttatatacccgcctgcgtaacgcacggaaactttgatgacttagtttataatgatttttatgtagggaaaaatgctgatgtcactatagttgccggatgcggagttcacactgatacagaagaagacgcaagacataatggtatacacaagtttattcttgaggaaaatgcaaaagttttatatcaggaaaaacatattggaaccggaaaaggcacaggagctaaaaaaatagaccctgtaaccgaatgcgagttaaaaaagggttcttccttaactatggatacaattcaaataggaggggtggataaaactacccgtaagactacagcaagcctgggtgaagatgcaaaactgataatccgtgaaagaatcatgactgacggtgatgaaacagccgatactgattttacagtatctctgaacggaaaaaattcagctgctgacgtagtttcacgttctgtagcaaaaggaaattcaaaacagagttatatttctaatataattggcaataatatatctaaaggacatactgaatgtgacgctatacttgttgataacggtacagttacagcttcaccgagactgacggcaaataactgtgattctgaattaattcatgaagcggcaattggaaagatagcgggagaacaattacttaaactcagaactttaggattaacggaagaagaagctgaacagaagataattcaaggttttataggtgaataataaacgaccatactattattgttatttttataatgattttagtatggtctttataataatatataatatatatatttatagttgaagatgctgttgttggtacggtgagaaatgtagataacttatttttataaacgctgtaacttaattttaacatgttgataaagtgtttgtaaacgaattgaaatattaacattttataccacaaaaaagtgggtttaatgttacacacattttaccaacatattacaaatattacaaatgtgtataactttgattatatttatgtaatattttatttaatttaaatctagtgttttaaatctcttaaatagtcaattaatacaactaacatccacagcattccaagggaacctaggatatagtaaaggtgttttactaaatatgcaaagtttatcatagaaaacggcaggattattacaaaaagtaatactgatattattattcttctttttagagttattatgttaaaataagataatattccatatccttctgatacagcggtggtaaagatagacatcatcagacagattgagtagatactttcgaaatttttgtctattaaacctgcaagtttttgcagaggaaagctttcataccaaacagtgctgaaattcataccgatagcaaaccaaaccaagaatataagcagaccgattatagaacctgctattgctgaacttataagtattgtttttctgtcttttacctcttttgtcagcggtgacagtacagaagccgctgtcagggtattatagcttacatagcacacagcaagaaaaatcatatttctgcctgaacctgataaaaagtctgttaaaaaaaatgttggggagtatattttagacagtattgagaaaattgatataaaaagtatagttaccgtgataataggaactaaaataatatttattgccgcaatacctttaatgtcaaaaataaaaactataaaacaaagtgcagacaggataacagcccctgcaagttttgggataccaaaaacgtttgtaaatatttctccgcatgatgaaagcatgacaataagaccgcatgtcaagtcgaaaaatattaatacaagaaagaacttttgaagtatcttagagaaactcaaagtatgttttacatagtctgatatagtatagagttcatacttcattgacttttttaatatagcgtaacaaacaaatataaataaaatggacgctatacatacacctgtatagtcagtatttgaacaaaagttgaaatattcacaaatttctctgccggaagcaaatccggctccaattataaggcctatataaacaaaaataattttaagacaattcatattatcaccactttgtataaagttaaaatcaatatattttgtatgagcttttataatataactatatatagtggacatgcttttatatgaataaatatgggaatttttttaaaaaatattattgacaagcgtagaaatttgtgttattattgtatctgcctcgtgaaagaggctttatttgtgttaggaatttgaggtgataattatgcaaacaaagattacattagcttgtaccgaatgtaagcaaagaaattacgatactacaaagaataagcagaactgccctgacagacttgagcttaaaaaatactgcagattttgtagaaaacacactgtccataaagaaacgaaataattagaggtgtagagaaatggaacaaaccaaaccgagtttcttcaatagagttgcaaaatactttaaagaagttaagtctgaaatgaaaaaggttatctggcctacatttgcaaaagttagacagaatactcttattgttatgctctatgttgttatagttggtatagttatttggggacttgacgctctctttacttggggtatgtcacttatcattagtagatagcaaaggtgattttttatgtcagacaaaaataaagcgaaatggtatgttgcccatacatattccggttatgagaataaagttatggacgatattttaaagaccgtagagaacagaggaatggaagatgttatccaggaagtccgcgttcctatggaagaggttatcgaaataaaagataacaaaaagaaagtctcagaacgtaaagtatttcccagctatgttatgattaagatgattatgaatgatgacagctggtatgtggttagaaactgccgcggtgttactggatttgtaggacccggatctaaaccggtagctctcacacaggaagaggttgagagtatgggacttgagcatacagtgataaaatttgactataacgttggcgacaatattagagtaaaatatggagctcttgaaggatttttgggtgtaatcactgagataaatcttgataagaagaaggttaaagcaactgtttcaatgtttggaagagatacggatgttgaacttgagtttaaccaaatagaatcaatagcataaatttgttacccacacggattattccgtttatatataccgaaattaatcggtctgtgggaggggcctagtcccgataataccacgcatgtgtacaaggaggtgtaaatcacaatggcacagaaagttacaggttatattaaattgcagattcctgcaggaaaagctactcctgctccgccggttggtcctgcacttggacagcacggtgtaaatattatggattttacaaagcagtttaatgagaaaacaaaaaatgacgctggcatgattatccctgttgttataacagtatatcaggatagatcattcacatttattactaaaactccgccggcaccggttttaattaagaaggcctgcggtcttgataaggcgtctggcgttccgaacaaaacaaaggttgcagaacttaaaaaggcagatcttaaagatattgctgagaagaagatgcaggatcttaacgccgcttctgttgaagccgctatgtcaatgattgccggaacagctcgttctatgggaatcactgttgaagagtaattattagttccgaataagacggataagtttggtgggaggaatattattattctgctgaaccacaataggaggatatagaatgaagaaaggcaaaaagtatcaagaagccgctaagcttgttgaaaagggtaaactttatgaccctcaggaagctttaagcgttgtttgtaaaaccgcaacggctaagtttgatgagacaattgagcttcatgttaagctcggtgttgattcaagacatgctgatcagcaggttagaggtgctgttgtacttcctaatggtaccggtaaaaaagtaagagttctcgtgtttgcacgtgacgataaggctgaagctgcaaaggcagccggagctgattatgtcggtgctgaagaactggctcagaaaatccagtctgagaattggtttgattttgatgtagttattgcaagccctgatatgatgggtgttgttggtagaataggtagagttcttggtcctaaaggacttatgcctaacccaaaagcaggtacggttactcctgatgttgctaaagctgttgaagaggctaaggcaggtaagattgagtatagacttgataaggcaaacattattcattgtcctatcggaaaagcttctttcggacctgaaaagctgggagctaactttaacgtattgatgggagctattataaaggctaaaccgtctgctgctaaaggtacctatttgaagtcagttactattgcttctacaatgggtccaggagttaaaatagctgcaaataagcttgaaaactaatttattttgggttgacaagttatagatattgtgttaaaatatcgacttgtcagaataattaatttgtaaaattatcttttatattccgtagacagcaggtggcagacgccataaatcctgccgaggatgatatgattatgtataattatgtccctcgcatgtctgcgagggatttttttacggaaggaggatttaaaattgccaagtgagaaagttttagaaaataaaaaagcgatggtaaaacagctgacagagagactgcaaaatgcacaggccggagttttggccgattatagaggtcttactgttgagcaggacacagaacttcgccgtaagcttcgtgaggcaaacgttgaatatacagttttaaagaacagtattatccgttttgctgctaaagaagttggtcttgaggatttagacagcgttttagaaggtcctacagctattgctacaagtaatgacgacgttatttctccggctaaggttctttgtgactttgctaagggaaatgatttgcttgaaatcaaagccggttttgttgaaggaaaagttatttcaattgatgaggttaagcagtatgcttcaattccatcaaaggaagttctcatttcaaagatgatgggttcattgcagtcacctatcagcaaacttgctcgtacattgcaggctatcgttacagaagaagctgtaccgggcggaaaagcagaagaaacagcagcacctgctgaagaggctcctgctgcagaagcgacagaaacacctgccgcagagtagtaaaatattaatttgtataaaataagctattaaatttagataatggaggaaaataaaatggcagatataacaaaaattcttgatgaaataaaagaacttacattaatggaagtaaacgatttggtaaaggctttagaagaagaattcggcgttagcgctgctgctcctgttatggttgcaggtgctgccggagctgctgaaggcggagcagaagaaaagtcagagtttgacgtagttcttgctggagcaggcgctcagaagataaaggttattaaggttgttcgtgagattacaggtcttggtcttgctgacgcaaaggctttagttgacggagctcctaagacaattaaggaagctgtatctaaggatgaagctgaagaaatgaagacaaagctcgaagaagttggagcacaaatcgaacttaaataattaaaaaattaagtttataccgctgtgaaattaatcacagcggtttttgtttgatgagttatggtataaaaaaatttattaacaaaacttttagaaaaaatcatagtaatagtaaaaaggttaagggtcgaaaatatatcatttaataaaaaacatttatattagaatctcaattacatgataatttgctattcatatttcacctgcttgaattttgatttaaaataattttctacatttttataacttatattttagttttattcttaatttgtttaccagatgtatcaactggatttttatcatttgtccatactataataagtaaactaactttatttttaataattgctacttaaaattcataatgtatataccatcatttaaattattatttaataaaaacttatattattatagagaaataaatgtcatacaataattattaagttatattatatagaaacatattattttataatccgtttccatcttccaaaattagagtaaatggaccatcattaattaattctaccttcatgtcggctccaaaaattccggattcaactttcttaaatttctgttttgcatattcaataaaataattatatattttttcggcatgagatggtgaacctgcgtttataaaacttggtctgttaccctttttgcagtcagcgtataatgtaaattgtgaaacaacaagcagttccccatctatctctattgatgataaatttgttttaccattactatccggaaatattctcagctttgatattttatcaactgctttttcagctttttctttatcgtcgttatcagaaattcccaaaagcgccaaatatccgttttctatcttgcctgttatcttatcttctacggatacactagcttttgatacccgttgtaaaactattttcattttatttgctccttctgttaattaaaaaatatacaaagccaattgcattttgtggttttaattactctatgttttgtatgtttctttataagaatattatcacccggagatagtttaagaatatttaaatctccatcatcgctcaatatttctaattctgcatatccggtaagaagacaaacaaactcatcctgatcttggtcataccacccggttgtatggccgtctgatattattttttctattctaatgtttgtactgtttaatagagtattaactatttcattttcaaacttatatgttggccggtcaaataaattttctatactaccaaatcctttcatattaatagattatattttatactttttttgtcaatttgtaaatatattaaattagagctttaattaatgttgtagattattaaagtttatatacattattttctgttttttgagactacgcacttaaagaggtacctatcggagctcttccgatgtttgctgaaaacaattttaatatctttgaaattaatttattatggttttacataagctatttctgttttctgagactgagcacctaaagaggtacctatcggtgctttaccgatatttgctgatataatctatttgctgatataatcttaatatatttattattaattgattatgattttacctaaataattctgttatccatgactgcgcacctaacgaggcgtctgccgcctgcattgagtatacatatcaatgacattgcaggtaatgtaaaaacaatttagtatgtatcacacacacttttaaaaaagtgtggtcacacctgccgatgtttgctgaagacaattttaatatctttgaaattaatttattatggttttaaataagttatttctgctttttgagactgagcacttaaaaaggccctatcggtgctttaccaatatttgctgatataatcttaatatatttattatttattgattatgattttacctaattattctgttatccataactgcgcacctaacgaggagtctgttgccgccctgccggtgtttgttaaaaaaactttataattattaatttgtttatattagatgtttaattacataaataatatttaataattataggtgtataaccaaaattgttactaaaaataattaattagtaacaataaaatgtttttagtaaacatcggcagggcggcaacagactcctcgttaggtgcgcagtcatggatagcagaattattttatgaaaattataaacgataagaaataaatatataaaagtgattactagcgaaaattatcagctccgttttaaatgcatagtagtaaaaagaaaaattatataattaaaattgagaactataaaaaataagataattttcagcaaacatcggcaggtgtgaccacacttttttaaaagtgtgtgtgatacatactaaattgtttttacattacctgcaatgtcattgatatgtatactcaatgcaggcggcagacgcctcgttaggtgcgcagtcatggataacagaattaatttagataaagttataaaaatatgttaatataaaggttatatacaataaaagaaattttatttaatgtaaagtagctgtttgattattaaacatattaataattatattttattattttcaaaaaacaattagaaaaaaataaatttataatttttaataatttagactaatatattaaaacattattataataaattttatattatatttttatataatactaagcccgtaagaatcaatttattcttacgggcttaaaatagattttaaatcaaaaattaacctagcagcctattatacatatcctgatatttctttgccgattcgttccatgaaaaatcttgtctcatagcatttttaattaaatcggtccaggcttttttatcactgaaaattttaatggcatatcttaatgtatacatcatatcatgagcagtatacggatagaaactaaatccgtttccctctccggtgaattcattatacggcataattgaatccttcaatcccccggtttcacgaactacaggaattgttccgtaggcaagtgaaatcatttgactgagaccgcaaggctcaaacattgacggcattaggaatatatcgcatgaagcatatactttgtgtgccagctcattgctgaacattatattagcagacattttttgtgaattgcaccacgcattatgtctaaacagattttcatactttgcttctccggttcccacaacaaccaactgaatatccatattcattagctcgtccattgcctctgctattatatcaaaacctttttggtcaacaagccttgatatgataccaatcattactttttcgccgtctacggtcaatccaagctgttgctgcagcttcatcttgttttctctttttttatttacaacgtttcttgcatcataattctcaaatatatatttgtccgttttaggattataaacattgtaatctataccgtttaaaataccatacaaagactgtgatcttgcagataataatccatcaagcttttcgccgcccatcggggtttgtatttctgacgcatatgtcggacttacagtagtgatatagtcggaataaactataccgccttttagtaaattcgcacagccatgaaactccaatttgtcagctgtaaaaaagtcacggttaagtgagaagaaatccgaaacgatgtcaatagagtaaattccctgatagcgcaggttatgaatagtaaatacagtttttattccctgataaaacgtgtctttattataatatgcgttaagcagaacaggcaccataccggtctgccagtcatggcagtgtatgatatcaggcttccagtcaagatgttttaatatttccagtgctgctttgtcaaaaaatgcaaatctttcgaggtcgttccacttgtatagataagggtcgccgaaataatattcgttgtcgataaagtaatatataacgccgtctttttcaagctcaaatactccgcagtattttcttctccatccgagcggtatatatataaaaaacttaaactccatttgttccagatattcatgaggaatacagccgtatttgggcattacaaccctgatatcatctcccagctttccgagtgctgacggcagggaaccaacaacatctcctaatccgcctgtctttgcaaacggggaaacttctgatgaaaccataaatattttactcatttgaaaacacatcctttcactaagcttttcttcagtaacattaaccgtttataaaaaaagtgagttaataattacactataatttctttaccgattaccattggatatgtatcttgacccacaagtttcttaccgcttctcaggattacacccttgtcaaatatgacgttttccaggagacagttttccattatctcagagttctgcataagaatgcagttttcaacagtggcgccttttgcgacgtgaacaccgcggaacaaaatactgttcttaaccgttccttctattttacatccatccgctataaatgagttcgttatttctgcggatttagaatatttagttggaacggtgtcttttatttttgtaaagataggattgtttgtgtttagaccaaacaattcatctcgtatatcctttttaagaaggtccagattaaaacagtaataggactgtatactgtcaatcttctttttatagccgctgaactcatatgtagaaacttttaaacctttggaaacagccgtaagcaatatgtctttggaaattgtatgtcttccgtgtgtgactgcatattctaccatatccataagcaattcgcgtctggttataaacatatgcatatatgaacagtctgtcttttgtttgcttggataaacgtgcatgtcagtaacaattttttcatcattgatatcgagcaaaatatgtttttttacatctttagcgctcaaatgtttagcttttgtataaaccagtgtaaaatcagcttcattttttaaatgttcttcaagaaccatgtcgaagtctatattacagattgtattacaatcagaaacaagaatatattcctggttacttttagctaaaaatgaagaaataccatgtaatatatccacaccgccgtgtgtttcaatacctgactcaccggtgtctttcggcggcagtatgtagagaccgtcgtcctttctatccatatcccacgcttttccggtgcctaaatggtcggtaagcgactgataattaacaggagttgtaatccccacttttattattcccgaatttaccatatttgataatatgaaatctataattctgtatcttcctccaaccggaacagcggcaagagctctaagacttgtgagttcgcccatactggcttccgggttttcagaaaatataacgcccagcatatcgtttttcatctatatcacctctactaaatttctatttctacttttcttcatgcacggattatacattttctgtaaccattgagcatacgccgatttcaatcttgtctcctatctctatgcctggtcctatcaatgtaatgtcatcgctgcatattttagtattataaaatgatttgtttgcgttatcggcagtgcttcctattgtggcttcttcacctattacggcgtctgaaccaataattgatttatttacaacagcgcccggtttaacagccgcgcccggaaggataatagagtctttaataacagccccgtctccgatagttacgccttcaaacaaaatggaatgttcaacccgaccgtaaatttcacagccctccgtagtatagctattcttaagagaaccgttttcgcccacatattgagggggctttacaggatttctgctgaatattttccatgtatcatcatccaaatcacaacccggttggtcgtctaaaagttccatattggcttcccatagactctgtatggttccaacgtctttccagtatccgtcaaatctgtgagccataagctttagtccgtcattaagcatagcaggaataatatttttcccaaaatcgttttctgattcggggtcgttttcatcctctgttaaatatttcttaagaacatcccaagagaaacaataaactcccatagaagccaaattgcttttaggctcttttggtttttcctcaaattcaactatctgcatatcgtcgcttgtgttcatgataccaaatctgggcgcttcatcccatggaacttcaataactgctatggttgcgtcagcatttgcttttttgtgcaccgacagcattttattataatccattttatagatatggtcacccgacaaaataataacatatttaggattaaactgttccataaaccctaaattttgatatattgcgtttgctgttcctttataccattcgcccttttctgcggatgtgtatggaggaagaacaaaaacacctccgttagtacgatccaaatcccaaggctgtccatttgcaatatatgtgttcagctcaaggggctgatactgcgtcagaactcccactgtgtcaatacccgaatgagaacagttactgagcggaaaatcaataattctatatttaccgccaaatggtactgcgggttttgctacattttgagtgagtattccgagccggcttccctgtccgccggcaagaatcatagcaacacattcttttaacctcattttatctcctcctattttacaattaacgttcgctttacttccaagaataaatatagatttatttttcggatttttcagtttctgcaagcgctttggttttattttctattgtttttatttcgctcgtctgttttttaactaagcctacaactttttctttcttaacctttttagttggaggcagcttttgtatataaagtgctgtaagcgccggcaaggttatatctattgaataatcaaactcgtcgcatggtatttttttagcatgatatgttttactgccgcttccatccccaccaaactttttgtcattactgtttaatacaactttgtaatcaccgttttcaggtactcctatagtgtaaatagcgtggtctataggagtaaagtttatagcaaccaatatctcgtctttcttgtctttggaaagtctcagataagcgagaacactgttttcgcaatcttgagctttaagccacttaaaaccttcccattcgccgcctgaaagctcgcgttcaatttcaaagaaggcaggatgttcctgataaaaatgccctaaagctgcggaatattcccacatctttttatggttatcatattcttcaagcctccagtcaagctgttcggcaaaacgccactctataaactgaccaaattcaccgcccataaacaataattttttcccggggtgagaatacatataggcgtataatagtctcagttcgctgaatttttcttcatatgttccccacatcttgtcaatcagactgcgctttccatgaacaacctcatcgtgtgaaagtgcaagaatataattttcagcaaaagcgtacatcatcggaaatgtaagtttatagtggtttcctttcctaaagtatgggtcgcactgcatatagtcaagaacatcgtgcatccaacccatattccatttaaagttaaatcccagaccgcctttattcaccggagatgttactcctccccaagcggttgattcttctgcaatcatcataacgttcggcaggcgttcaaatactgccatattcagtttttgaaggaattctatagcttctagattctcttttccgccgtatttgtttggcagccattctccgtcattgcggttataatcaagatataacatgctggatacggcgtcaactctcaagccgtcgaaatggaattcctgcagccaaaataaggcgttggaaattagaaatgaccaaatttctgtctttgtccagtcaaatactaaggtgccccattctttatgttcgcctctcctgctgtcaggatgttcaaacaggcattcgccgtcaaatttggcaagggcaaagccatctttcggaaaatgtgccggaacccagtccattattaccccaatatcattttgatggcatttgtcgataaagtatttgagttcttcaggtcttccaaaccggctgtttgcgctgtaataacctgtaacctggtatccccatgatgcgtcaaacggatattctgagagaggcataacctcaatatgagtgtatcccatctttttcacatacggaataagttcgtccgccatttcggtataagttaaatagcttccgtcctcgtgcgttttccatgatgaaaagtgcatttcataaatgtttataggtttgtaataaggctctgtttttgtccgtttatctatccattttttgtcattccattcatagtcaagttcagttgtgatagatgcgttggccggtctgacttcgctatagaatgcgtatgggtctgatttaagaaatatatctccgcggaatgtttcaatactatatttatagcactgtcccggttcaattccttccaaaaaaacttcccatatcccaaaatccatatgtttgtacattctgcccttgtttctgtcccatccgtttccgtcacaaactacggatacgctttttgcatgaggagcccaaacagcaaacaaataaccgtcttttccggaaaatgacttgcccctgtgggctcccagcatacggtaggattcatagtttactccctggttaaacaaatacattggagcatcgtctatataggttccggcatccctcttttttccgtttttgtaaatgtcaaaatcattcataattgtgttctcctaaaaatttattctgctccatattaaaacaatacttatagaattattatatattttatacaagtttattttatcataattagaaatttttgtctattttaaatgctcagaaagttgcacaaaatatacttttcatttttgtacgtattgataaataatattatttaatatgagcaaaaaacgtcatatcttgtggttggagaaacttttttttaacttttgccaaaatcaacaaaaaatttgagattttaaacagaaatttatatttaatacagtaaaaattatttgacaattctgtatcaataatattatgacctaaattaaaatatgtacaaataaaaaaattaatttcaaatattttcaaaatagttataaaagtttttttaactcgtccaaagttattgaattaagtttatcaatctttgatttaagcagttcttttccaattaaagcgtccttttgattttgaagaagcaggaaatttcgtctgagttcatcaaattccatgagcttaggccggttcagcgttatccccaactcttcgtctttggaagtcagcgaatcgtcatgaaatcgataaagataaagaggttctgagaactcagtatgccttatggtgaaaatttcatttattctcatccagtagtcataatcttctataccaaacctatcgtctgaatactcgccgattaaatccgcaacagatgctctgtacataaatgccgcgccaatagtattattggcagttatatttagattatccgttccggttggaagtattacattgccgctcatgggcggatactcataccagcctttccctcttaatacgtttccatttttgtcaatcaatttcatatttccgtaaaccatagcggcgtccttataataatcaagttcctgtaccattttttctatgaatttcggaagcaaaatattgtcatggcttatccatgttaaatactcgccttttgccattttaaaacctgaattaagtgcggccggaaggagtcggttagcgttatgagaaataacaaatatattgttattatttttggcgtattcttcggcaatacttccgcttttatcatctgaaccatcgtcgacaataattaattctatttttttataactctgtgatattactgaatttattgcatattttaggtatttttcaccattatacacaggtaacacaattgagaccagcccagtttctcctaagtttttaaggtctcttacagaaatattataaatattattaaatttgtttttatactcggagaaagttaaatgatgtatgtcattattcttattcgcaaatcgagtcagccaattcaataaagccatttttttcacattccttatagtataattccagctcgtcagcgttgcttttaattaatttttcgatttcacgctctgctatatttattctttccaacgcatagcttttatcccaagccgccgggctgtatccatctttgtacagacggtaagtggtaaagatcccggcttttatggtctcttttatgtgttctttggtataacgggttttatcaacgtcatgatagacaactgcttttggctctatgcctattttgcagccgcagtttaatactttaaagcatagaacggtttcctctcctcctgcatagttgttccccacacgaccatagctttcatcaaagccgccgacagcgttaaatatattgtgcctaactgaaaagttagccccgaacggaaattcatattgcttgtttatctcacggtatttggtgtaaggaacggtgtattcactccataaagtttcttttccctcaagtataatatttggtttgggttccggtgttttaagaattatttgtcctccgattattccggcattgctgtgtgcgtcaaaagcattttttattgtttcaagcagacgcggttctgcaatagcgtcgtcatcaatatagacaaggtattttccgttggatactgtcgcacccaaatttcttgcataagtcaatccttttcgttcttctttaattatttttatatcacagtcattgtattcttcaaaggtattgttaagttcctcgccgttgtttacaataataatttcatatttctccgacggaagggtttgaccgcaaagtgactttacagcattggcaagtttttcaggccgattgtatgtgcacacaataacggatatatccagtgggtatttgttatcggcaataagccgcggcggcgtcgttttgatattacggcgcttatagcttttaagatcgcatataagttttttaatccataaacgaatattgataatttttccgccggcggcgtttaacaaagtcattgtgggcttctttttgcgtttcaaattatcacctcacataaattttgcatggagcggatattaatccaaaagtttgcggaggagcaattgacttaatttccgctgctccttcaatatactcgtaataagtgatggggagactgttcttgttttcaagacctgccgctattgtgtacttgcctgagttaaggcggttttcaaaacaaaaatttatttgattggttccgtaatgaagcggttcgtcagtttgaaaaactatcaaatcaagaccaaatttgtcttttagcgctatagacactccaagactatcaaggcttatatcatcggaaatatatacatcgactgtaatcctaacgttttcatgcagataaaactccccgttttttggtatagaaatgttttttattgctccaatatggtttccgtaatggtttaaggcgccggtgagtctctgtttttgactgtaagctttattgccgggatttacgcagctttcaatatattttgatgtaacagttgcaacgtcgccgtttgcaataattttaccgttatctaaccaaattgctctggtgcagaatctgcggactgaatcaatatcgtgcgaaacataaagaattgtcttgccaatttccttaagctcctcaaattttttaaaacattttgtttgaaaacggtaatcaccgacagccagggcttcatcaactaaaataatatctgtatcaagccatattatggacgcaaaacccaaacgcaccagcattccggaagagtaagttctaacaggcaatttggcaaattcaggtgatatttccgcaaaattcaaaattttatcaatgtctcgggtaataaaatttttactgagaccattaacagtaccgtttaagtatatgttttctatgcctgtatattccgggttgaatccaacgccgagctccagcagggaggaaactgaaccttttacttcgcatgatccattgtcatagccggaaattcctgataagattttcagcagtgtggatttgcccgagccgttttttccaatgattccgacgcattctccgggtttgacacaaaaatttatatcattgagagcataaaaaagttctgcagagttaaatttttgagaaccaaataaagaaccaaaaatttttttaaatggacttttggattttataaatgacttgtttaaattttctatcttgataatattcataaattttgtcctaagtgtaaagaatataattgtattttaaaattatactatattaaaaattctcatgcaacacttgccaaaaatatattttttaaaaaattttaaaaaaagtgttgacaagcattaaattctgtggtaatatatcattcgttgacgcgttaaaatattttaacggcagctgtgctggtgtagctcagttggtagagcagctgatttgtaatcagcaggtcgcgggttcgagtcccatcaccagctccagaaatttaatattaaaccactgctttttagcagtggttttttgtttaataatcttttttactcttcgccgaatagatttatacggagactttcaagctgttcataaagttcaaaaaaactgccgcttacaggcgtccagcggtatgccatatgataatttccatcttttactgcttcaattattatatccatcccatcagctccgctgcggtgaacctttaacggcatattccaaaaatcagtttcagagaattttttcgttactaactgagtttcttctttagtcaatgttttttcttggatttcatttgtattatccattcttgacaaagttaaattataaacatattttacggttgaagtaccgtcagaattgaggttgattcttaaaacataattgccgctaaaggtgccgaaatatgatagtcggtaaacttctccattattttggcgaagattatcctcccccatacttttgagtatggatgagatagcaggatctgaattttcacctatccctaagattatcatatcagaagaagaactatcaccaatccatctttcagttagtattggattatagttttggtcacgtaaattctgcattaattctccccaatatccacatggcactctatagccttctgtttgataaagagagtataaattaactaatgaacctttttcaatatttaatatattaaatatatcttctttgttagaagtttttctattatatatatcagttatgtttgtttggctgtcattatgttgagtaacagcatatcgtataccatctacagatgaattaggatcttcattccatatataaacatctgcaagaatataatttaactgaatagagtctttagcaacattcttagatgccgctttatcaaaatagataatttcattataatatactttgtatcccaaagcttcggctatagaccttaaaggaatataaatttctccgtcaatagttaatggctcataatcaatctttgtttttttgttattgacaaaaatcgtattgcggttaactccggcagttaaagttgtatcatattctaagcctttttgtataagcttaatagtttcatctgttatttcatatgaaaaaccggaattaaaaatcttattacaacaagaagcagggacatacgttataccgggttctaaaacaaaaggttttatatcgctaaattcggtttcaatgccgtcttttataaatattggagcttctttgcctgcagtatctgcatttgtagtatagctccataaaaaagttaaaacgatagttaaagcaaaaataaaagccatttttttcgtaatgtgttcctcctaaaaggatattcatttcatacttattataccatacatcattcctaataacaatatagcagtataaatataaagcttttattatgtttgtataaattatacaaaatcgtaaatggcgaatgagcaaacacgagataaagagagaaaatagctaaaataaagagtttgtgtttagctaaattaattttttgcaaaaaagtcttgacaaaattatgaaaccgtattataatagctaagcaagttagagaggacgtctttaaggagacgtcatttattttgtaaacttattaacttaattataaatttaggaggtattcattactatgtcaacttatatggctaaagctaatgaaatcgaaaagaaatggtacattatcgatgctgccggcaaacctctgggtagagttgcagctcaggctgctacaatcctgagaggaaaacaccgtccggaatatactccgggtgttgactgcggcgaatatgttatcataatcaacgctaaagacgctgttcttaccggaaacaagcttcttcaaaagaaatggtacagacataccggttatatcggtcaccttaaagaagtttcttataaggacttaatggagcaaagacctgaaaaagctatggaattagctgttacaggcatgattccgcataacagtcttggcagaaaagaattaaagaaacttagaatttacgcagacgacaaacacgaacatgctgctcagtcaccgattgagtggacacgtgagttttaagaaaggggacttatataattatggcagattcagtacagtattacggaacaggcagaagaaagagttctgttgccagggttagattggtgcccggcacaggtaagattacaataaacaagagagatattgacgattactttggtcttgaaactctgaaggttgtagttcgccagccgctggacgctacaaaaaccttaggcaagtttgatgttttgattaatgttaacggcggaggatttacaggacaggccggagctatccgtcatggtatagcaagagctcttcttgaagttgatgatgagttcagacctgttttaaagagtgcaggatacctcacacgtgacccacgtatgaaggaaagaaagaaatacggactcaaagcagcccgccgtgcaccacagttctcaaagagataatcagaaatataattttaacctcccattgtttgggaggttttttattgtatcagaatatatttgttatctaaattttaaatactcaataaacttatttactgcaagcgaagcagtttttctgtccttcattgcaatcccgatatctcggtgtgccggtacatcgagttcttttattataatattatatggaaccctttttagtatcagttcaggtaaaatgctgacgcctaatccgctttctatcatagacattattgcgtagtcgtcccaggtggtgaaatgaacagacggggttaaatcattattttcaaatatctccgatacttcggcttttgcgcccttttccagaagcataaaaggctctttgcaaagagctgagaccgggacatttttgttcctggataactcatgattttcaggcagtacagccaaaagcctgtcgctttccaaatataacgcgtcaaattcagaacgggttggaagacgcaaaaaaccgcagtcgacgcgtccttctgatatccagttttctatttcagtgtagtctcccagtaataattcataatctatatttgggtaatccttttgaaattcttttattatattgggaagccagtgagtggctacacttgaaaaagttccaattcttataagccctgattgaagtccgtttaattcatctatctgcatttgaagtttttcatactcttcacagacggatttaacatatggaaaaatttttaaaccgtccgatgtgagcttaacgcctgatttgctccgttcaaggattgaaattttccactcgtcttctaagtcgttaatcattttgctaacagccgactgagaataactgagcatatcgccggctttagtaaagcttccgtattccaccgcggcaacaaaggccatatatttagatatattcattagtaaagctccgtccttatttattctaattagtaatgtaaaacattataaacattctcttttggaagtgatataaaaatgatataataacatatagaatttgtcaacataaaaaggacaataaatcttttgaaataagtggggtataaatatgagcttacataataatcgcgttgttattaaagtgggaacatcgactttgacggtgctttgaaggaagaaacgaaactaataagaaaagttacaaaaatagataaaaatgttatgcaggcggcaggcggagcgagttttggtacaggaggtatgagaaccaagctgaaagcggcaaagctggctgtttccaaagggattaacactgtacaaatggtaaatcacctgatattctttataaaattttagacggtgaaaacgcaggtacattgtttgtgggaaaggattagactatgaaattttcgtatgttaagtatatatttgctcttttgctgtttgggtcaaatgggatagtggcaagtttcattaatttaagcagctatgagatagtattttttagaactttaataggaagtttgtttcttatatctatatcttttatcgccggaggaaggctgacgttttataaacataaaaagcaatttttatatgttgttatatccggagctgcaatgggaacaagctggatatttctatatgaagcgtatcaacagattggtataagtgttgcatctcttgaatattactgcggacctgttatagttatggcgctgtcgcctataatatttaaggaaaaattgagttttactaaagggctagggttcgttattgtcgtttgcggattgtttttgataaacgggtatacaattggagaacaaaaaaacctttgggggttgttttgcggtcttatgtcagcgctagtatatgccgtaatggttatctttaataaaaaggcgtcggatataaaagggttagaaaattcaatgctgcaattattatttagttttattactgtcgccgtgtttgtctgtcttaaacaaggttttgtaataaagactaatatttcaagtctgccgtttattttaattttgggtttatgcaatacaggtattggatgttatctttatttttcatccataggcaaactgccgatacagactgtagcaattctggggtatatagaacctttgtcagcagttatattttctgttatatttttaaaggaagttatgacgtttacgcaagctatcggagctttgctgataataggaggagcggtattgggtgaatgtatatttaacaaatcaaattatcggtgtaaaagaagattataggcgaaagttttttacataattatagttgtaatatcaaaaatagattgctttacaaaaaattgttacctgaaaggtttgattatttaggatataaagtaaatagttatattcataaccgcacatagaataataaatactaaacaaagcataaaaattttaaacctttttaagcagaaagatgaagatatttttattttttaaatatagtttataaattgtaaagtatccaacagcatttataaaaattatagtattcacttttgtatttctaaattcttcttgaataattcaccttgttatgttaaaattttttataatggcggaagcaatattttaaaatactctcgtcatttatgttgtatagacgtttgattgcgaatcattattaaaattataagtgttgttataaagcaagttttatattttaataactgaatttttaaatatatttgattggtatcccggttataagtagattatttgggaattagacagggtggaaattatgcttgaaaacgtaggtcgggttttaacaaaaatagatgattttgtatgggggcttcctcttatacttttaattattgcagttggtatttatttgactgttcggctcaggggtttgcaaattaaacatttgcccaaagcgctgaaatttatagtaaaaaacgaagagaacggcgacggagaagtgtcaagttttgcggctttgtgcaccgctttgtcggcgactataggaaccggaaatattgttggtgtggcgactgcaatttgtgccggaggtccgggcgcgcttttttggatggttattgccgcactgtttggtatggcgacaaaatattcagagggtcttttggcgattaagtatagggtgattgagccggacggacatgttttgggcggcccgttttattatatagaacacggaatgggcaaaaagtggaagtggctggcaaagttgttcgcgtttttcggcgtctgcgtcggtctgctgggacttggaacattcactcagataaatggaatatcttctgctgtaaacaatttttttgaccctaacatgagcaatacggttaaaatattcggaatggaatattcatggacggttattataaccggaattattgttactgtttgtacaggacttgtaatcatcggtggaataaagagaatttcaacagtatcagaatttgtcgttccgtttatggcaatcttatatgttacggtctgcgtaattattcttattgtaaatataaaggcgataccggcggcgttcggggagattatagccggagcgttcggttttaaagcggccgcaggaggtatgcttggggcaatggttttggctatgcagaaaggcgtagccagaggaatattctcgaacgaagctggtttgggttccgcgcctatagcggcggcggcagcccaaacaaaggaaccggcgcgccagggtcttgtcactatgaccggcacatttattgatacagtcgttatctgcactatgaccggactgtgtatagttatcaccggagcatggagacctgaattggcgcttgagggggtaggtgttactacatacgcttttcaaaatggactgttttttctgcccggtgcagtgccggcctttataatcatgctgtgtctggtgttttttgcatttactactattctcggctgggattattacagtgaaaagtgtcttgagtatttatcgggtggaaatttaaaggctgtaaaggtctatagatggatttacatattagctgtcttcttcgggccttatatgactatatctgccgtttggacaatagccgatatatttaacggtcttatggcgcttcctaaccttatagcgatagtggcgttaagcggcgttattgcgtcagaaacaaagaagtattttaataagtttggaaacagataactatagacttagtttaagaagagttgacaaacagcagggcgcatgatataattacttaaaacataatagaaaagctgagaaggagagagtagcttttattaaccattcagagagagggacgtttgctgagagtcccttatggaagatatttgtgaaaaccactccggagccgcatatctgaacttatagtaagatttgccgtacgcctgcgttaaaggatagggtttgattgaacctaaagttaaaattctgaggtggaaccgtgcattgaactttatgcacccttaggacacataggttatctatgtgttcaagggtgcttttcttttatgtttaataatttttaggagagattattatgaagattattgagagagacggaactgtaaaagaatgcgagccggagcaagagcttcatgttctgcggcacaccgcggcgcatgtgatggctcaggcaataaaacggctttaccccgaagccgattttgcttttgggccggcgacagaacgtggtttttattatgatgtggatttaggagatacaaaacttaccgacgaggaccttttaaaaatcgaagatgaaatgcgccgtatagtaaaagaaaatctgcccataaaaccgtttatattgtctcgggaagaggcggctgaattgctgaaagagagaaacgaaaagtataagcttgaacatatagacgatttgcctgaagacgccgtaataagcttttatcaacagggcgaatatatagatatgtgcgtgggtccccacctctgctatacaaaggctttaaaagcttttaaaataacgcagcagtcaggggcgtactggcgcggtgataagaataacaggatgctgacccgaataaatggaatagcttttaaaaatcaggccgaactggaggaatatttgaagctgcgtgaggaagcggagaggcgtgaccacagaaaaatcggcaaagaaatggagctgtttatgttcagtgacgaggggcccggatttccgttttttcttccaaaaggtatggagttaaaaaacgctttaatagagtactggcacgaaattcataacaggagcggttattcagaagtttcgacccctatgattatgagcagaagtttgtgggaaaccagcggtcattgggagcattataaggataatatgtatacgacgcggattgacagtgaggattattgtgtcaaaccaatgaactgtccgggcggcgttttggtttataaaagcagacctcacagctatcgtgaacttccgattagattgggcgaacttgggttagttcaccgccatgaaatgcgcggcgcgcttcatggtctttttcgagttcgctgtttcactcaggacgacgcgcatatttttatgaagaaagaacagattaaggatgagattgtcagcgttattgacctaataagcgaggtttatacaaagtttgggtttaagtatactgtagaactatcaacaaggccggatgacagcatgggaagcgatgaggactgggagaacgcaacaaatgcgcttataacagcgcttgagagcaaagggctgctgtatgaggttaatgagggagacggagcgttttacggccctaaaatagattttcatttggaagacagcttagggcgtacatggcagtgcggaaccatacagcttgattttcaaatgccgctgaattttcagcttgagtatatagatgagaatgggtcaaaacagcgtccggttatgatacacagggtgtgtttcggctctatagaacgctttataggtattttaacagagcattatgcggggaaattcccggtttggctcgctccggtgcaggtaaaggtgttatcgatatctgacaaaaatttggaatatgctgaaaaagtatatcagaagctgtcggaacttggaatacgctgtgaattggattccagaaacgaaaaaatagggtatatgatacgagaggcaaggcagatagacagggttccgtatatgctgattatcggcggaagagaagcagaaaatgaaactgttgcggttagggacagagcaacagaccaaacggaaagtatgacctttcaggaatttgctgaacgtatacagtatgagataacaaaaagattataaaataactgttaaaagccccttatggtagtttttgttctgccataagggggccgtttttttgctgaccgttttaattacagtttttaatggtgttgttcattttttgttctgtctgtataaacctaatcacggttaccggtaacagttaaacttttatttagatatatcaggcgggccgaaattataaatttcataatacgactcaagttctgcgtcggttataggctcaacctggataagaccggtgcagtcaccgctgctgcaggcgttgccgaggttaaactttccttctatatctttaagcttttttcttttttcaaattctttcataaagcttcagctccttaaatacttatattcttagtattttgtctgcggcgttattctaaaatttgttgcggttgttattgaaaataaaaaaaatgcctattgacccaattatatatttcccacttatatcttaaaatatactttaaataaaaaaacaaaggtttcttgtgttttttaccaattttgctgcgaaaaattttaccattatgacattgaaaatcaggcgcttatctgctataataatttgtataaattttatattatttatttaatatgtcaaatatttttatttattatctcctaaatgtttttgatgtttaaattataaaatagagagggtattttatataatattgaaaaaatttagggtttaagttattaattagtcgaaaggggataatcactttggtaaaaggcaatgttgttgtaggtcagtccggaggtccgacctctgttattaattcaagtttggttggtgtatttaaagccgcaaaggatgcgggagtagaaaaaatatatggtatgagaaacggaatcgaagggtttttaaataaaaaagtcgttgatatgtccgaatacgtaaaaaatgaactggacattgagcttctaaagcgcaccccgtcgtcttttttgggtacatgccgttttaaactgccgtctgtggaggaaagcgaggcaacatataaattattgttcagtattatggaagagcttgatataaaatatttcttctatataggcggaaacgattctatggacactataaaaaagctgtcaaattacgccgaggaaataggcagcgatattaggtttatgggagtgccgaaaactattgataacgacctggctgttacagaccacacaccgggttatggaagcgctgcaaaatatatagcgtcggcgctgaaagagataatacgcgacgtaaacacttatcccacagaatcggttacagttgtggaaattatgggcagaaacgccggctggctcactgcggcggcagctctttcaagggctgaagactgtcctggacccgacctgatttatttgccggaagtaacttttgactacgacagatttttagagcaggtgaaggctgttaaaaagaaaaaaacctctgtagtcattgcggtttcggagggaataaagctggctaacggcgaatatgtttgtgaagacaataaacaggcgacattcgaggattctttcggtcataaatcacttggcggaaccgctttatatttggcggattttattggcgccaacttaggtgttaagtccaggggtattgtgttcagcacgcttcagagatgcgcgtcgcacatagtgtcaaggcgtgacattaccgaggcttttatggctgggagcgaggctgttcaggcggccttaaacggcgagacaggcaagatgattatatttaccaggacgtcaaacgagccatataatataatatgctctacatatgatgtaaataaaatagccaatattgaaaaggttgttccggacgagtggataataaatgacggaacatatgtttcggatgaatttttggcatactgccgtccgcttataataggagaactgactccgtttatggttgacggactgccgcgccatttgttccttgattaatttgttctttgaataatataaattatttgttaacttaaattataataagatatagatttgttagggttataatagttggctacgacaaaaaaatttatgtttttgtttaacataaagatagcgtgtttctttattataagattatactaaactttgtcagaagtaccggagcatatcggctattaataaaagctgcctcaggaactgaggggtgctaattattggcggtgcggaaagcatagtaatattttttgaatacattgatttacgaattaatatagttgaattaaaagttaaagtaaacgcaaaacaaatatcagccgcactttgtattcgttacgaagtacggctgagtttgtatataaacctatactgactatatttatttgttataatgtaaacacatactgttaatttttttctttatatataaaaaatagtcttgtaacttgctgattgattttgtgtactgttgtgaaaaaagacatttcgagtccatattgatataattcactaaaaagtcggagttttagtgaacatcggcaggcttgtgttaacaagcgcgtgaggtgagctatcatctgaacacgtagtgttcaatatataaatttgatatataatattttgtttattaaaaataatatatatctactatgtatatgaccccatataatatatattattacataataatggtgtttgaaccatttctttttatttgagtatacataataatgacattgcaggttatggcaaaataagaacatatgtatagcacacactttcaaggaaagtgtggtcgcactcgcaagaaaaagaaacgcttcacctgtgaccacacctgaaaggtgtgtgtaataaaaagttacttattttaaataacctacaatgtcattattatgaatactcaaataaaagaaaaagtgcttgctcgcttaggtcgcctacggctccaaggggcgctcgcccccgctaatttcttttgcgctccacgcacaaaagaaaaagccttgtaactttcccgttgactttgtgaactgccgtgaaaaaagatattccgagttcatatgatttaattcataaaaatgctgggggttcagtgaacatcggaagggcgcatttatgcgccgcgttaggtgaactatcatctgagcacgtagtgttcaatatataaatttgatatataatattttgtttattaaaaataatatatatctactatgtatatgaccccatataaaaaatttattattacataataaggtgtttgaaccatttctttttctggcaagaaaaagaaacgcttcacctgtgcccccacctttcagactaactattaaaagtcaatagaaaaataaaaaaagttaaaatcttttcggtcaaataaggaaactagaaaattgtatgtcaaataaagcaatagtaaattgcttaaaaaaatagtattaaaaatacagtattacataaactcaaacggcttggtaactctgacccgttttctgtaaatgatagattactctcactagtttttttactgcatgagatattgcaacattgtaatgttttccctcagttcgcttttttgccagataattcttgaaggtttcatcccaatgacatacatattttgctgcattgtataatgcgtaccgaaggtaacgcgaacctcgtttctccatgtgtgaatagctattggttatttgtcctgactgatacgttgatggtgacattcctgaatacgcaagtattttatcaggagatgaaaacttactgaaatcacctatttctgctactatcatagctcccattgtgtaactgatacccgggatagacagaataggcgtgtttatgttatccataatatgcttgatttctgcttctatctcctcaatttctgctgtaagttcttgtattagctttatggtatgctttagctcaagagattttgctggcatgtctgaaccgattgagttttttgcggcttccctaaaaccaattgcagtatctttgccatatctgcctctagatgcagtatgcagcaggtttgtaagcttcgttaagtgggcttctgcaatatgatgggctgacgggaactctgaaagcatagtatagacagattttatatgcagcgaaggaacaagtttttcaagttccgggaaaagtatgttcacaagccgggaaacagtggttttgagttttgctctttcagaaactttataaaatctgtatctggttagtgactttaattcttcgttgtgatataatatatctgagtaggactttaagtctacattagacattaacatcatagcgattgtatgggcatcaattttatccgttttagtctttctgaggctgagagactttctgaagagattggtatgtaatggattgataacaaaggtagtcaaacctttatcaagaagataacccaaaagattgtatgagtaatgtcctgtggcttcaagccctacttttactttgttaaaatcttttgaaacagattcaattctttgataaagaaaattaaaaccttctatagtgttctgaatagtaaaagcattaaataaaacctcgccgtcagaattgcaaatgaagcagtcgtgcttgtcctttgcaacatcgataccaacaaaaatcatactaaaaactcctttgaaaaaatatttgatactgttccacagatactctttacgattgtaacctcgttctaaataaaccgtcgtgcggtatctaactaattaacaaatgtataaagagactgtggttagagccttcaagaaaccatcaagtggtaggtgggtgtaactaatccacagtatctaataacattatagcacatgcccttaaaatcgaacaatattaactactactttattatacgaggtgggtgtaataaaaagttacttgttttaaataacctacaatgtcattattatgaatactcaaataaaagaaaaagtgctgctcgcttaggtcgcctgcggctccaaggggcgctcgcccccgctaatttcttttgcgctccacgcacaaaagaaaaagccttgtaactttcccgttgactttgtgaactgccgtgaaaaaagatattccgagttaatattgatttaattaactaaaaaagtcggttttttagtgaacatcggaagggcgcatttatgcgccgcgttaggtgaactatcatctgaacacgtagtgttccttatatttataaatattattactttaatatggattctttttattagtgcgatttaataagtaatcggttgaggtattgtaaaagtcggcaagtttcactagaaaatgtagaggtatagtttgaaaacctcgctcataacgagagtatacagtttgttgtattcctaaaatattagcaatttctgtttgttttaaccctgcgcttgagcgtagagttcttaaccttttcaaatacattttatcacttcctttacttatcttctaattttttctgtttttcatcttcattaaaataagaagaaggcaggttaagattaagtaagtcgccgggtttaacctctaaaatatctgcaatattaaagaaaacttctaaagagaaggaagaagatatattaggagcttcaatagaactaagatgggaccgactaatatgagccttctctgcaagttcatattgagtatagcctttagcttttcttaaagcagaaatcatcaagcctaactcaacaaaacggtctctgttttcaaagcctacttcttttttcataagtattctccttttattttataaattcatatatataatcaaatatatataattatattatagcatataaaaacaaaaatctaaccgattatagtttgaatttatataaatttaaccagtagaattggtcagattataaatttatattataaagtcaaaacgtatattgaatactgcgtgttcagatggtagctcacctaacgaggcgcataaatgcgcccttccgaagttcactgaaaaacctgctttttagtttattaatctagattgaaaacttgacttttttaatgagtaaatcaataggaactcgaaatatctttattcacggtaggttacaaagtcaacgggaaaatagtagggcttttttcatcatgaagcatggcttcatgatgaaatgagcgggggcgagcgccccttggagccgataggcgacctaagcgagcaagcactttttcttttatttgagtattcataataatgacattgtaggttatttaaaacaagtaactttttattacacacacctttcaggtgtggtcacaggtgaagcgtttctttttcttgccggaaaaagaaatggttcaaacaccctattatgtaataataaaattttttatatggggtcatatacaaagtatatagatagtttttttaataaacaaaataatataattatatatattgaacactgcgtgttcagatgatagctcacctaacgagacgcataaatgcgcccttccgaagttcactgaaaaacctgctttttagtttattaatctagattgaaaacttgatttttttaatgagtaaatcaataggaactcgaaatatctttattcacggtaggttacaaagtcaacgggaaaatagtagggcttttttcatcatgaagcatggcttcatgatgaaatgagcgagggcgagcgccccttggagccgataggcgacctaagcgagcagtactttttcttttatttgagtattcataataatgacattgtaggttatttaaaataagtaactttttattacacccacctcgtataataaagtagtagttaatattgttcgattttaagggcatgtgctataatgttattagatactgtggattagttacacccacctaccacttgatggtttcttgaaggctctaaccacagtctctttatacatttgttaattagttagataccgcacgacggtttatttagaacgaggttacaatcgtaaagagtatctgtggaacagtatcaaatattttttcaaaggagtttttagtatgatttttgttggtatcgatgttgcaaaggacaagcacgactgcttcatttgcaattctgacggcgaggttttatttaatgcttttactattcagaacactatagaaggttttaattttctttatcaaagaattgaatctgtttcaaaagattttaacaaagtaaaagtagggcttgaagccacaggacattactcatacaatcttttgggttatcttcttgataaaggtttgactacctttgttatcaatccattacataccaatctcttcagaaagtctctcagcctcagaaagactaaaacggataaaattgatgcccatacaatcgctatgatgttaatgtctaatgtagacttaaagtcctactcagatatattatatcacaacgaagaattaaagtcactaaccagatacagattttataaagtttctgaaagagcaaaactcaaaaccactgtttcccggcttgtgaacatacttttcccggaacttgaaaaacttgttccttcgctgcatataaaatctgtctatactatgctttcagagttcccgtcagcccatcatattgcagaagcccacttaacgaagcttacaaacctgctgcatactgcatctagaggcagatatggcaaagatactgcaattggttttagggaagccgcaaaaaactcaatcggttcagacatgccagcaaaatctcttgagctaaagcataccataaagctaatacaagaacttacagcagaaattgaggagatagaagcagaaatcaagcatattatggataacataaacacgcctattctgtctatcccgggtatcagttacacaatgggagctatgatagtagcagaaataggtgatttcagtaagttttcatctcctgataaaatacttgcgtattcaggaatgtcaccatcaacgtatcagtcaggacaaataaccaatagctattcacacatggagaaacgaggttcgcgttaccttcggtacgcattatacaatgcagcaaaatatgtatgtcattgggatgaaaccttcaagaattatctggcaaaaaagcgaactgagggaaaacattacaatgttgcaatatctcatgcagtaaaaaaactagtgagagtaatctatcatttacagaaaacgggtcagagttaccaagccgtttgagtttatgtaatactgtatttttaatactatttttttaagcaatttactattgctttatttgacatacaattttctagtttccttatttgaccgaaaagattttaactttttttatttttctattgacttttaatagttagtctgaaaggtgggggcacaggtgaagcgtttctttttcttacgagtgtgaccacactttccttgaaagtgtgtattatacatatgttcttatttttccataacctgcaatgtcaataatatgaatactcaaataaaaagaaatggttcaaacaccctattatgtaataataaatttttttatatggggtcatatacaaagtatatagataattatttcagtagataaaataataaatattaaatggaattataaataaagttaatttgagcatataagacctgcaatttttggacacaaaaatatccctgcctaaacagacagggatatttttattactcatgatttacattatccttcactacaacgtcatgggctccgccctcaataatcgatacactgcttaccaatgtcagttttgctttattctggaattcagaaatattcgtagctccgcagttgcacatggttgagcgaaccttgctcagggtggttgttagattatcatgcagtgagccggcatatggaacgtaacagtccactccctctacaaatgagagctttgccgcgccgccgaggtcgtacctctgccagtttctcgctcttgcgcttccctcaccccagtattccttcatgtaactgccgttgaccataactttattggtcgggctttcgtcaaatctagcaaagtatctgcctagcatacagaagtcacagcccatagcgagcgctaatgttatatgatagtcaagaacaataccgccgtcagaacatatcggaatatatactccggtttctttgaaatattcgtctcttgcctctgctacctctatgacagaagtagcctgtccccgtcctatacctttggtttcacgggtgatacaaatgcttccgccgcctattcctatctttataaagtctgcgcctgcctcagctaagaatctaaatccctctctgtctactatattgccggctccgactttgactgtgtcgccgtatttttcacgtatgaattttataactctcgactgccattccgtataaccctcactggaatctatgcagagaatgtctacccctgcctctacgagagccggcacacgctcctcgtaatctctcgtgtttatacctgctccaaccacgtatctcttatgtgaatcaagcagttcaagaggattctctttgtgctgttcgtaatcctttcgaaatacaaatgccaccagtcttccgtcatcgttaacaatgggcagtgaattgagcttatgttcccataatatgtcgttggcttcttttagagttgtgccctcaggagctgtgatgagcttgtcaaacggggtcataaaagttgagattttttcatcaggcgacatacggctgaccctgtaatcacggctggttactatacccacaagcttgccgttttgtgttccgtcttctgtgacagctattgtggagtggcctctttcagcctttaatgcaagaatatcggctaaggtcttgtccgggcttatatttgagtctgactcaacaaaaccggccttgtatgccttaactttcctaatcatttccgcctgcttttctataggctgtgagccgtatataaaggatacgcctccctctctggcgagggcaatagccatatcaacgcctgaaaccgactgcattatggcggacacaagcggagtgttcatagataatgcgggttcctcaccttttttatattttacgagcggtgtttttaaagagacgttgccgggaatgcagttagaatcagagtaacccggtacaagcaagtattcactgaatgtgtgagacggttctttgtaataataagccatatttatatcctcctataaaattaatattgtgaatagtacggtaagtaagtttaagattttaagtttgccggtaaaaaatgtataatatcacgcgtcttatataacaatatatgagctgatattttatccatatattacggcaattttgttagataataaattaaaaattaattgtcgtttttttaataagatattatatcatagagttgaatatttgtcaaagaattgctaaaaatgattttaagtgaaaaatcttataaattcatcaaaatgacgatataaagcaagccgtgaaaacgtggactgaactcaaaattggattggaacaaaaaaatatcttcctttttttggtgaaaagttactataaattcatgttttcagggctcaaaaggctcaaaaatttgtttatttatacaaatattttataaatcaaaaaaatagtgtggaaatttgcagttatttgtagtaaaataaatacgtattggtggattaaggggatgggagtatttgcagtgcttataggctataactatattgttgtggcaaacggtcattctaagacgttaacctgaaacagacatgcagatattaaccctacttaaagctttgaaaaaataattattttatatattttttttaggaggacaaaaaatgaataagcaagaattactttcagctatggctgaaaaatcaggtttgacaaagaaggattcagaggcagcactcgcagcttttattgaaacagttcaggatactctcaagaagggtgaaaaagttcagttaatcggatttggaagctttgaagttagagacagagctgccagaacaggaaagaaccctctcacaggtgaagaaatgaatattcctgctgcaaaggttccggcttttaaggctggccgtgctttaaaggatcttgttaacaacaagtaattttaagaaaatatataaaaggaatgcggtttagccgcattccttttttaatttaaactttattttgctgatctgtttttataattaggatttaaaacaaattctattttttataattaccaaaggtttaacatgtaacctgccgtttataaaattgtgcaggagttttctaagtaagattttattttcgttttaacagctccgggtgatccatggcttttccgagaccggttacaacacaggtttcggggtcgtctgcgactttggccttcatattgagctcacgccagataaggttggtaataccgtaaattttagagcatccgcctgtgagtacaataccgtttctgcaaatatcaccgataagttcaggcggagttttttcaagaagcgttctgatggcgtcaactatagctccggcggattccttaagcgcgtctaaaatttcatcgcttgagacctgaattgtctttggcagacctgaaaccaaacttcttccgcgtgcttccattgctaaaagcttgtcccttttatagacgcagccgatttttatctttaattgttccgcagttctttcacctatcagaacgttatactttttcctgatatatcttattatagcgtcgtcaaaactgtctccggctgttttaatagaactgcttatcactattccgccgagagatataacggcaatatcacaggttccgccgcctatatccacgacaacgtttccttttgcttcctcaacgtttatcccaactcccaaagccgccgccaaaggttcttcaaccaggctgacccttccggcgcctgcctgaattccggcgtcaataacggcgcgttcttcaacctccgttatattgcttgggacgctgacaaccattctcggttttataaacgctccgataaaactgtgtcccgacgatttttgaacaaaatgcttgagcattctttcagctgtcgaatagtcagaaataacaccgtctttaagaggttttaccgctatgatgtttccgggtgtgcggcccagcattttttgagcttcagcaccgaccgctattatcctgtccgtgccggagtccaccgccacaacgcatggctcccggtctattattcctctgcctttcacataaacaagaacggtagacgttcctaaatctattccaatatcctgcccaaacataatgaggattctccttccaaaatattacagatatgttactatattgcaacacaatgattattgtagcttaaaatattcctattgtcaataaaatttgccttaaacctttttacaaaaagcgacttaattatacaaaccaactgtgtaaaatactgctgaaagagttagattggagtattaaaaccttataatatttttaaattaagggacaacaataaaaatagttaacctaaatttaacattagcatgattttggatttaacattagggtaataatataaatatgttaagaaatgtagaatttgctaacggaatcagcggtattatcaaatcggttgatttaaaacaattaaaaggagagaaaaagatgaaaattaaaagagggtttatcttagcggcggctgtatcggttttagtgttgggatgtatggctttaacttcatgcggttctgataccgccggcaaaggcggaaatattacggttatttcaagagaagacggttcgggaacaagaggagcgtttattgaactttttggaatagaggagacaactaacggtgaaaagatggacatgactgtggatacagcggatataacaaacagcacctctgtaatgatgacaagtgtatcaggcaatgtgagagcaataggttatatttcgctgggttcgcttaatgacagcgttaaagcgctgaacgtggacggcgctgaagcgacggctgaaaatataaagaacggcacgtataaggtttcacgtccatttaatatagtgacaaaagataacgtttcggaagtgacaggagactttataaagtttatccagagccaagaaggacaaaaagtggttgaagacaatcattatatttcggaagcgaacaccggaaattatgcgggcacaaaaccgtcaggcaaaattgtcgtatcgggatcatcttcagttacgccggttatggaaaagttgaaggaggcatattcggaattaaatccaaacgctgaaattgaaatacagcagagtgactcaacaacaggagtgaccaacgctttgtcaggagtatgtgatataggaatggcaagccgtgagctgaaggacagcgaaaaggaaaagggcgcaagtgcaacggtaatagctctggacggtatagcggttatagttaacaatgaaaatcctttaaataatattacatcggagcaggttaaacagatttataccggagagacaaccggttgggatgatattcattaataccaatcatataatggggtatttattatgacgaaatttaaagaaaaatttatgcacggcgtgtttttattctgtgcgtgcgtatcaatattggcggttcttctgatttgcgtatttttatttgcgaacggcataccggctatgaaagaaatcggtctgtttgactttctgatgggaagacagtggaagccgaataataatatatacggaatactgccgatgatattgggaagtatatatgttactgccggagccattttattaggcgttccgataggcattcttgtggccgttttcatgacgaggttttgtccgaaatggctgtataaaatacttaaaccggctgttgatttgcttgcgggaatcccatcggttgtgtacggattttttgggcttatggtaatagttccgctgattcgtgatttgttcggcgggagcggaacgagtatgttagccgcgtcaattgtgttgggaataatgatactgccgactataatatccgtcagcgagtctgcgataagaacggtgcctgaaagttattatgaaggttcgctggcgcttggggcaagtcacgagagaagcgtatttagggtagttctgccggctgctgcttcgggagttatggccggcgtgatacttggcgtcgggcgtgctatcggagagactatggcggttattatggttgcgggaaaccaggcggctctgccgagaggattgttcagcggcgtaagaaccatgactgcaaacattgttttagaaatgggatatgccgcagatttgcacagagaggcccttatagctaccgcggtggtgctgtttgtgtttatcctaatcataaacgtctctttttcagttttgaaaaggaggtcggaaaataaatgagaataattttgagaccgtcaggcgaggcagcggcggaacaaagatttgccgggaggcgcagcggaatgaataaatcaaagctacagtcagtgattttaagaactcttgtatatacagcggcgtttataacattcggcgttcttatttgtcttattgcttatatattgataaagggaattccaaacttgtcgctagaccttttcagttttgaatacaactctgaaaatgtctcgctttttccggccttgataaacacagttgttatgacggctctgtcattggttatagcggtgcctttgggagtgttttctgctatatatcttgttgagtatgcaaagagaggaaacaaaatagttggccttatcagactgactgcggagaccctttcgggaataccgtccatagtttatggattgttcggattccttttgtttgtcacagcattttcgtggggatattccctgcttgcgggagcgtttactttggttattatgatactgcccgtcataatgagaaccactgaggaagctcttaaagctgttccggatacttttcgtgaaggcagttttggtttaggcgccgggaagcttagaacagtgtttaaaatagttctgccgtcagcggtgccggggattttggccggagttgttttatctgtcggcagaattgtgggagagactgcggctttaatttatacagcaggaacagtagctcagattccgagcggtttattcggttcaggaagaaccctcgctgtacatatgtacgctctgtggagcgaggggctgaacactaatcaatcctacgctacagccgttgtgctgcttattatagtagtgatactgaacgcggcttcatcggcattggctaagaaaatttccagcaaataatattgggtttatggattccagcaaaatccaaatttaagtataaggataaaaaattatgagtgtgatatccattaaagatttaaatcttcattacggggattttcatgctttaaaaagtgtaaacatggaaatacctaaaaatgaaataaccgcatttatcggtccttcaggctgcggcaaatcaacattacttaaaacccttaatagaatgaatgatttggttgagggctgcagaatagacggagaggtaaaacttgacggtataaatatatataaggacatggatactaatttgctccgcaaacgggtgggaatggtttttcaaaagcctaatccctttccgatgagtatttatgacaatatagcgtatggtcctagaacgcatgggataaaatcaaaggctaagcttgacgagatagtccaaaagtcgcttgagcgcgccgctatatggaatgaagtaaaagatagattaaagaaaagcgcgcttggtctgtcaggaggacagcagcagagattgtgtatagcgagggcactggctgttgaaccggaggtgttgcttatggacgagcccacgtcggctctcgacccgatttcaacttcaaaaatagaagaccttgcgcttgaattaaaaaagcgttatactatcgtcatagtgacccatagtatgcagcaggcaacgcgtatatcagataagaccgcattttttcttttgggtgaagttgttgagttcggagatactgaacaaatattctcaattcctaaggataagagaacagaagactatattacgggaaggtttggttgatactatgagaagcaaatttgacagacagcttgacaaactaaacagagagctgattgagatgggtgctctgtgtgaaaatgcgattgattgcgcgatacgggcgttgctaaatcatgataaggaaacagctgatgaaactctgtctatcgaggaagagattaatcagatagaaaaggatattgaaggtttgtgtttgaagctcctgcttcagcagcagcctgtggcaagtgacctgagattgatttccgcggccttgaaaatgattacggatatggaacgtatcggagaccaggcggcagatatagccgagatagtaatccacaccgaattaatggacggatataacagcgcgcatattaaaaaaatgactaaagcggtttccaaaatggtaactgagagcgttgacgcatttgtcggaagcaatctggagttagcccaggatgtaataaacagagatgatgaagtggatgatttatttatagaagtaaataatgatttaataaaatatataactgaaaatccccagaatgcttcggctgcacttgatttgatgatgacttcaaagtatttggagagaattggggaccacgcggtaaacatagctgagtgggtagaattttctatcaccggagttcatagagaatagtgaggataaaaaatgatttattgtgttgaggatgacagcgggattcgggaattggttgtatacagccttgaaaatacaggattttcggctaaaggctttgaaaatggaaaacagttttttgacggattggatgagagcagtctgccggatatggtgctgcttgatataatgctgcccggtgaagacggagtcagtatacttaaaaagctgcgtgccaatcccaagaccaggaacttgccggttattcttctgaccgccaaagattccgagtatgataaggttatcggtctagacagcggcgcagacgattatgttgcaaaaccgtttggaattatggagttaatctccagaattaaagcggttttaagaagatgcggtcatgagggaactgtctcagacgactgtgtatataacatcggctgcataacacttaacacaaaaaagcactctgttgaggtcgacggaaatagtgtcgaactgacgttaaaggagtttgaagtattgcgcctgcttatgaaaaatcaaggaacggtaataaccagggatattctgctcgaacagatatggggatatgattttgacggcgagaccagaactgtcgacgtacatataagaacccttcgtcaaaaactgggtcacggaggaaatataataaagactattcggggcgtaggataccgggcggaggaatgatatattaagttaaccgttgggcggcacagtaaattgtatttgaaagaaagggggcgtcattatgaagctgagcagcagaatttttggaggaattatattaacaacgttaataagtgttgttttcacaacagttatagtcgccggacttttatataacaatctatcaaatgaaacaaaaacacaaataaaaaacgaagctgaatatataagtgaaattcagaatatttctcctgtgactatggacataagccggctgggaaataggggacagaaccgtataacccttataggttctgacggaacggttaagtatgacaactacagcgactttaatgatatggaaaaccatattgggagacctgaggtacaggacgcgcttgaaaaagggagcggcgagagtaccagaacgtctgacacattcggtaaaaagacatattactacgccgtaagactaagttcaggcgacatacttcgtgttgcatgtgaaacatccagtatgtttggagtaatttttaaggctatgccgggaatattgttctcaattataattttgcttgctatagctatgtcagtcgccggattccttacaaaaactatagtaaaccctattaatgagcttgatatagataatcccaccgcggcaaaggcttatgatgaactgtcacctttacttgtaaaaatcgatacccaaaacaaggaaatgattgagcagataagcacaatttatgacactcagagagaaaacgaatttataacgcagcatatgaatgacggattaataatcattagcagcggccgacatattatttcggctaatatggcggcaaaaaaaatatttgattttgataatgtcagcagtaataacggaaagataaattacctaagcatatgccgtgataaaaagtatatggaggccgtagaaaaggcgtttcatggaatatcaggggatattacgctggaacgcggagaacgtatatacagaatatcagtatcatctgttgcaaaagatttttctgcggggaatggaaatgataaaatatatgctgttttaatgtttatacatgacgtgactgagagagaagcgtcagaacaaatgcgaagagaattttcagctaatgtttcacatgagcttaagacccctctgacttctataatgggatgcagtgaaattatgaaagccggaatagccaaacctgaagatatgccgaggtttttaggtcagataaattctgaagcaaaacgtttgttagctttaatagatgatattatacgattgtcaagccttgacgagggtaatggcattgagatgagtgatgtggatttatacaaagtttccggggacgtattaaacgagctggagatgaaggcaaaacagagtaagattactcttgagcttgaggggagcagccaaagtattgaaggaaacgagcgcctgattcatgagatgatatttaatctttgcgataactctatcagatataataaggagggcggaaaagtaaagataacagtaggtaaatcaggagataaaaaatttatattagtggaggataacggtataggcataccaaaagaagaacaggacagagtgtttgagaggttttacagagtagataaaagtcattcaaaagagaccggaggcacaggtctgggactgtcaatagtaaaacatactgttttaattcataatggaaaaataactatgaacagtgaggtttcaaaaggcacgaaaataacggtaacattttaattatatcttcaaaaaaatttttgctgtattaaactaacagcaaaagaaggtggtttctaaaaggaacctctattttggtgaactggtgttcttatagaacttatttaaaaactcagtaaaataaagatttttgattatcagtagttagtattaacctcaaaattaaatatttttataatgctctgacgtaagaaagtcggagcatttttgcgctctgaaacgcagtttttgctctatttgccattgtatattttattaaggattcaagttatattacgaaaggaaatgtatttaaaataaatattaaaaatgcaaaacagctatctcctgaatccaaaacagagaaagatgtatatttgcttaacgacagaaaactgctttggtctcacctgcattattataacggtaagatttgttcaatgtgtaactaataaaagaaaacgagtgtgaaagtttttattggaaggagcacttgtatagattgttgtattgaagtataataatttatggattaaaagaaattattaaataactctatgtaaaagccatgaaacaccatgtaaactgcaaatgcaactaaaaattgcggaatagttggtggaagcaaccatgagttttcgatagaatatgtacagaaaagcaaataaaacgatgtttttcacaaaaagcaaattgaaaggagaataaatgaatacgactagatttttaactgtaacagttgctctgctatattgttttttttggatagcagttgcgggagcagccgtttatctttttgtgttggttgtcagagcactgaaaaaatatatcaatacaaaagaaataagagaagaaaagaaatcaatacgaaaatctttgggagaagtgctaaaggaaaacagacttcgctgtaaaatgacgcaggaatttgtatcagaaacattaggagttagcagacaggcagtttctaaatgggaaaatggaacatctgatccaagcacctcaaacttgattgctattgcagaattatatggcgtatcttctgaggaactattaagaagtacaaatgctggttgccaaaaaaattccaaagaaaaaaagtaagaacaatataaaaatgtataaacaggagaaaggtaaagatgattacattatcaaaaatatataagaattatgataatcttaaagttttgaaggatgtcaatcttcatgtagcaaaaggggagatttatggtttgattgggaaaaatggtgccgggaagacaacgatttttaaaattattttaggattaactgaatttgaaagcggaacgctgtgtattgccggcagtaagaaaaaaacagaattgccgcagaaacgtaaaaaaataggtttttttataggaaataatttctatgattacctgacagcagaagaaaatttgcactattacaggcagttgaaagatattaaagacaaagaagaagtaaaacgtgttttaaatcttgtgggattggaaggtgtaacgtctaaatacggttctttttctatgggaatgaagcaaagactgggaattgcaaatgctttgctcggaagccctgaaattctgctgttagatgaacctattaatggccttgaccctcaaggtattgctgatataaggactcttattgtaagcttgaataggaagcaaaatatgacgattattgtttcttctcacattctcggtgaattggaacacaccgcaaataaatttgggtttgttcatcagggaactgtgttaaaggaaattacacatgatgatttgaaagtaaaaagaagcgcggttcaaatttatgtaggagatttggaaaaggcacgttctgttttaaaacaaaacaacattcctgttttgcagcaatcctcggcttataaatctttggaagattattattttgatttggtaggaggaaaaagatgtgagtaattatgttttagcggatattaaacgtatttgtcataaaaaatcgtttcttaggacaatcggaatatatattgggttgttttgtataatgatgtttatatattttaatcctacatatacggcggatgcttatgttgcaaaaacgacaatatttttaggattttttcctctctttgttggtttgactgtatttctttctgtgttttatgatgatttcaaaagtaaatccattcaggtggcgattggatatggacttcaacgacataaagttgttctgtcaaaggtcattgaaagtattctgttgatttttgcgtctatcttctgtattggtattttaacattattaactcctgtggtattgggacttgctttgaatcaggcgcaggtcatagagcttattcttagcgtgatagttgaagcattacgagctgtgggatatatatgtatttcagcgataccggttttttatacacaaaatgcagtgaacggcacaatagtatacgttctgctttcatcaagaactgtaatgcttcttgccactatgattttaggacaagaattatttgtaaatatgattggagatatgacaaagtatttttatacatctcagctatatagcattcgcagcgcctttttgcagaatggaacatgggacatatcgacgatgtgtgcagcattgagtgtctatgtggtgttacctgtcgtaatatcggtattcagttttgagaaaaaagaattgaaattttaggaggaaagctgaaatgaaaaaaataataactatcatagttactattgttatagttatgtgcggggcgtttatggttaaaggctattataatgaccgttatgtagcatcggatagtttttatacacagattccgttagatgaagtaaatgaagattcatggcttgtcaataaggacggagtaaatcaggaaaagggaaaagaatataatcttattgggtataaccagaatggagaaaggaaagaactatcgtttaagaaaaaaggaaatgccgaagattattatgagccgggaacttacattaaggtaaatacaagcaaaactttagttgtaggggtagaaattatcactgaaagcgacataccaaaagaagctttaaacaaaataatttctttaggagttaaggaacaaagaaatcaataagatttataataatattattgaaacatgaacaaaaaaatattataagaacgattagtctttcaattatgtttcacaaaaaattaaaggctataataaaggtgaatattaatactatagggttgattttttgaaaagagtggtatttgataaaatcaggtgtataatggatttggcagtataatatgggtttgcagaaattgttataggacagttccataaagttatcacagcaggaatgtcagctaaagtgaatggaactcgccatttgcagacagtagttgtgaagcatattcattagactggtgattcaaaaaattaaaaaccgagtgttttacagaacttttcaagtcctgtaagaacactcggtatggtcggagtgactggattcgaaccagcggccacctgaaccccattcaggtactctaccaaactgagccacaccccgttatcttgttatatgtatccgcaacaataatgaattatagcatatattgaaattaaaatcaatactttttcaggaaatttttttgtgtttttatcataaaaatatccgaacacgctgtgatgatgttcggatattttcgaatataagttagcttaaaaattgtcgctcagcccggcaaccaaatcctgcatttcatgttttgtctgaacacagcgggctttgtttattacgctgtgtctttccgcttcagtcatttttgcaaaatgctcaagagctccggtgttctgtgcaagcgccatgctcagaccaacaggaatattgttataatccagcatttttttgctccttcctcattgttattcatattatcacctatacttattattgacaatataatatttgttatacacttgtgataagaaatattttccaaactaattttatctatttactgttgataatatatattctaatcaagcaaatgtgaaagagcggcaattccttcttctatctcgttgtttgtaagtcctccataaccgaatatgaatgttttatccgggagtttgtcagactgtttaaaaaggaaggctgaaagcggcattatttttactccggccttatatgctgattttttgagttcctgttctgttttttcagttttaaaagttactaaaaggtgcgttccgccgttgtctccatgtattgttaaccggtttgcgaatggaagattgtttagggcggatatcaaaatatcttgtttttctttgtatatctttcttaaggaattaacatatttgatagcgtgtccgtctttaataagctccgctacagcaaattgttctgcccgtgaggcaaggcaattataaaacggaagtttaaggctccatttttctatcagcggttttggcataactaaataggcgatttttataccaggggcgaggcagcgggaaaaatcacccatgagaattactctctcggaatcatccatagtgaataaagatctaggcgcgtttttttggtatataaagcttccgtcataatcgtcttcaactatataatggttgcccatctttgcccagtcaagaatttcacggcgtttatcctcactgataatctggccgaccggaaactgatgattaggcataaaatacagcacgtcaatatcactgtttaataaattttttatatcgaatccattaaaccctatatttattaatcttatttccgaaacgctgtcttgaatactgctgaaagagcggcggtagcacggattttccaatccccaaactgtatcttttccgagaacgcggcaaagacatgtaagaatgtaatcaattcccgcgcctataataatttgattttcgtcgcattttatacctctgaccgcatacaaatactttgcaaccgcctgccttaaacatgggtctccgggcttttctccgtgagaaaataagtccggctggtcgtatatggcgttgcggtaaatcctggcgagagattttttcggaattttggagagttcaagaccgttttggctgaatatatattttgcatcgctctgcgtctcccaatcgagatgaacggagtcttgaaaaagattataatcaggattaacataaaatccgcttgaggccttgggtacaatataaccttcactttcgagaagctgatatgcgccgagcacggtatttgtgcttatgttaagcttctgcgctaatttacggcgtgacggaagccgttctccgccggtaatttttccggatataataccgtcttttatatggttatagagctgcttataaagaggaagttttgaatttgggtcagggtagaactcaaggttatccataatttgcctccaaaacaatgatttatcctgcttttttatttaagtttttttacaaaaatataactaatagtattatactaaattggtaccaaaaaatcaacattaaagcggttctataaaataaattattttcgaggtataatatgtttacctaataaataggaggaaaagaaaatgagaaaagtctggaaaagattgttaagttttgcggtgggcgttagtttaaccgctgcagctttcggcggtgtggttctgtcgcagttctcagatgtttcggcggcaaagaactttgaccctgaaactgtaatgtggacaaataatatggttgaaaatgtggatgaaaattactcaagcatggatccaaactggagcaacaaggacaagagcgaagttcaaagtccgtatgcgaaaccgggtgaaaagttagataagtggtcatatgctgagttcctatggactcacgcatatcctataggcaacggcagaatgggcggtatggtagccggagctatcgacaaagaaatcattcaaatcaatgaggataccatttggagcggttctccctatgcggatttgcagaatgagaatggcgaaattgtatcaaacaattcaaacacggatactactgctatcgctaatgcagagcgtatttcggcagttaaccagacaagcggaagcaaagagggcggctggagatatttccgcggtgctgacgcaaacggaaatccggcagaaataggttcggctgacgctgttgtcggagatgaaacatttagaactaacttcccggcgtttgccaataagagtatctcaaatcaggctttaaacaatgataactctgctacgaacgaagcggttcaaaacagatacagtatggaacgcatggtggaatcaacattcctgggaaatccaaaatcacagaaagttttcaagtcgtttgttgaagtatatcttgactttaatcaaagtcataaggacgtaactaattatacaaaagctttggatatggaaaccggtaccgttactgttgactatgattataacggcaatcactttacaagagaaagctttgccagctatcctgaccaaacagtggctacgcatatagaatcagacggcgacctcaattttgacgctgctttccatacataccataatcaagacgcgtcagcctataagtttgaaaaagtaagcgataatgaacttaagcttaccgcgcgcgttacagacggaggaaagagcaatgagccgggcggtcctaacgttatacgttttgaagctcacatgatagtagacagcgagccgggagcggttttaacagtttctgatgataatacaatcatcaatataagcggcggaaagacagctacaatctatgttgtcggagcttcgaattatgtggactatctgaatgttgacaacgctaagccggcaaacgactgcgcggtttacgtaagcaacattaaatcaaaagattatcagacaataaagagcagacaccttgaagatttcagtgagcagtttacccgcacatctttatctcttgcaaataaagaaggcgttaataattctaatgttcctacagagaagaggatcagaaaagatgtaaacggtgacagcggttataaagtaggagcagacagctcactttcaaaggctaatgcaaacggcgtatacagcgcttatggaggcggtgataaccagctggcggcactggagttcaattatggaaagtatctgctcatatcgggttcgagaccgggacgtgatggtaatgccgcaaccggagatattccaatacaaataagtcagcctctgacacttgcgggaaaatggaacgcaagcagaagcgcttcgtggggcggaaagtatactataaatattaatactgaaatgaactattggccggcacagccgctcaatttggctgaaaatgaaaagccgctgatagaaacttttgcctcattggcacagggcggttctataactgctgcaaaccagtacggtatatataacgaccgaggcgatgacacatatcagccgggagacccatgggtaatgcaccataactatgacttgtggcgcggtactatgcctatagacaacgcaacagcaggcttatggcctaccggtggagtatggctgcttgaccatgcttggcagtattatcagtataatttggataccgagtatttggcagaagtttatccatatattaagggtgctgcatcattctttacaaagtacttggttaaagaccctgtaaccggatatttaataacagcggcgtcatgctcgcctgaacagggcggagttcagccgggaccggcaatggatacacagttggttagaaacctttacgacactgttcaaaaagcggctaaagttttgggcaaagagacagaagacgctgatttgctggctaagatagcagaacagatgccgtcaagttatttggcagatgagccgggtaaggttgcgccgaatcttattgacgaaaaaggccttattaaagagtgggcacgcggagatgttgcttttgacttctcgacggttgctgatggaagcggaaaatataagaatataattaacccgtttacaggtgcgtcaacaagcataaatgagcatattgcaaacaataataatggacacagacattgttcacagctttgggagatgttcccgggcaagcatttgagcgcttacagcgaaaatgaaagcgagcaggatatatttaaggcatatcagagttctgtcagcggacgcggagccggcagcggtcagggctggggtgtcgcatggagaatcaatttaaatgcgcgtgcccttaacggcgaatttgcatcgacattgcttaatcagttgtttacaacccgtacatcaccaaacttatttgaccagcatcctaacttccaaatagacggaaactatggtgcggcaagcggtataacagagatggttatgcagagccatgatggttcaatcaacctcattccggcaataccttcagattggcaggcaggaagctttaaggggcttaaagcactcggcggagctacagttgatctgacttggagtgaaggcaaacctgttgaagcaaaggttactgcagcaacagacggagagttaaaagtccgcaataagtacatgggaacagctgttataaaggacggcgaaggtaacgtagtgaccggaacacttaatcaggacgagactttgctttcatttaacgcgtcagctggtaagacttatacaattgacaacttcggcgagaccgaaaaggaatatatagaagcgacatgggatagtttagctacggatactaaagggttctttaattctgtcaacgattcacaattgcctaggatagagaaaaacggcaatgtgggatttatatataacacatattatcccgctcacggcggagtagcaggtgaagttggatattattatccggactgtactatggatagacttaagagtctttcgcttgaattggatacccgtgctaagactgacggatatgtttctataagactggattcgaaggacggtcctgaaatcgcacatagtatggttacagcaaccgggtacagcgcgcaggatttgggcaagattactgttcctgaaggcgtgacaggaaaacacgacctttatgctgtattttatacagaaggaaatgttaaagataagtgggtagcgaatgtaaagactttgcacggagtatatgaggttaaaaatccgaattataatcctgacccggatgcaagcgcaacaccggatgttgctccgagcgcaacgccatctgcagacagcggattagaagtaactgaagcggaaggaaattacacagccgccgtaagttcgaatgtgtttgacggacgcgcaaatgcgacagttatatttgcgctttataacgatgaaggcgtattgattgacataaagagtgcaggtgtgacgccggagacaaacacggcggtatatgctcctgcggcgaacggaaatctgaaagttatggtatgggatgatgtgactaatatgacgccgttagtggatactccatatgaagctaaggtatccgtttaagttaagggcgaattttaataaaattctagattaaaagtaaaaagcccgccggttttatataaaaatcggcgggcttatgtattaatgttttataataactaagtttaataggttattattataaattatatatttactatgtatataaccccatataaaaaattttattattacataataaggtgtttgaaccatttctttttctggcaagaaaaagaaacgcttcaccaaagaaaaagtgcttgctcgcttaggtcgcctacggctccaaggggcgctcgcccccgctaatttcttttgcgctctgcgcacaaaagaaaaagctctgtaactttcccattgactttgtgtactgccgtgaaaatagatattccgagttcctattttatttaactgttcaaaaaagttggtcttcggcgaacatcggtagggcaaacgtagtttgccgcgttaggtgagctatcatctgaacacgtagtgttcattatattagttatatattattcctttaacgtggattcttttcgtttgtgcgatttaatgtataatctgttgaggtattataaaaatctgcaagttttactaaaaagtgtaatggtatagtttgaaagcctcgttcatatcgtgaatacaccgtttgttgtattcctaatattttagcaatatctgtttgttttaatcctgaacttaaacgcagagttcttaatctttttaaatacattttaccactctctttattaatcttctgcttttttctctttttcatcattaataaaataggaagagggcaaattaaggtttagtaaatcgccgggtttaacctctaaaatatcggcgatattaaagaatacttctaatgaaaaagaggaagtaatattaggagcctcaatagagctaagatgagaacggctaatatgagctttttcggcgagttcatattgtgtgtaacctttagcttttcttaaagctgaaatcatcaatcccaattcaacgaaacgatctctgttttcaaaacctacttcttttttcatatatttatcccccaagatatttcttataatatataataacatatctgtatttatatgttagcttttatctgatattaagataaaattatttcaccgacacaatggaacaaaaaataaagtattactgatatatataataaaagagacatcaaaataataaaaaccacagctaaaactgtggttttactttgttaccttattaatctagttatttcttatatttatatttaagacataatttcaaattttatattttcatcttcatcttctaatcttttgaatatatcaaatatcttactcatatactcatcaaaatcttttggcagagtattaacacctttcacataaatgactgtgtcaggaggacaatattcccataagctatcccatagcgcagacagattatttccataaaaatcaggaaatccaaaagtatcttttataatcaaatgtaattttaatggtgacttgcacccggtaaaatctaatgttatctgattcataatttttcatttcctttttgttatcgctatctaaaaaagtaaggattttagtttaacaaattatattagatatatttgtatatatagaaatgtatatttgtcatgaactagaattaagtaatctatccattatttccccggcttcttttattctgtcttctattacgtttctgcatcttttcaatccttcatgtgtaagcgtgattgaatagaaatgctgaagattcaaaatctcaaggttaatattgctgttattttttgggtatgggaaaaataaaaaatagttgacttgattatagtatttctgcataagactgattaattcattaaaatttaaatttcccataattataagagtacgaaaatcttcaaaaagaagtgagtttctgtcaacaacttctacattgaatttgtcaatattaaaaacattttctgatgctgtaataaagtgaattacattcatacgaagcggtgtaatataaattccttttctagtaaatcgatgcctaactttttcccatagcggatttaaaaattttgattcgttatgtaatgagttattatagatatagtcatattctagtatttctaattcttttttttttaataaagaaattagcgtatttattcccaaataattttcatcattattatagtaatcaaaaaaatatctgttgaacctggttgaattagcaagatttttatcgaaatattccattaaatcacctttagtttcaaacaaggataaatcaatcttgttcatcttaaactcctttgtatatcggtataattggaatactattttaaatcatatttttaattattcattgtaaggcgaaataatataattctgtgttttaccgatttaaaaataatttgcggaaaatacaattatgcaatatctggtatataaactttgtacttatgcatggtgatattgtttaacaaatgctttaatttgttttattaacaataagtacaccggttataccttcatgcctatagctgaatatattgcctcctatatgaacaatactgttcggctcatattttagtattaactcagaatcttcgttatataattctccgttctcaccataaaaaactgattcacagctggaagatattattttatcacggttttcgccttgacaaataaaatagtcatcgttttcaataattttatcccaccactcatttaacgtaagatatccataacgatgtataatattccaccccccgttgtaaaatactttggcataaccgaatttgttaaaatcatatcctccatttgtaaatggagttgtatctgttaaagctgtatccaaccacggctctatcacaaattcgcctgaagtattaatatatccccattttccgtccgcttgaactgcagacaagccgttattgaaataggtataatgagggaattttacccatcctttttgaccgtggaatgcgctataataatattctggagtaatatttaaatatcgtgcagtaatttcacctgaagtatttataataccataacgttctccgatacctggaacgtcttcttttataaacgcataaccttcatgaaaatcctgtatctctgagaacaaacattcagtaatcagagttccgtttatatctgtcaatccccaaaggcctccaacgttgaccggaataacgttgttttcaattaaacatttgaaattataatcattttttatctcgtcatattctataggtatcacaatgtctccacttttgttaatgattccaaacttctcatcttttcgaaccagcgaaagtccattttgaaaacaagcataccatgaacaataatagctattattgtataaatcaaaatcgtattcaaaattgatgactgtttctccgtaagtgtttatgaatccccatttgccatcttttttgacggcagagagaccttcggaaaaaaattctgccttatcatatataagaggaacagcaacttttccgtatagatcaatataccccaatttgtcgtctttgcgaaccagcataagattatttccatcagaacccaaagctccgtcgttgttaggataaatataatcatatatgtctgaaaacaatgctttcccattttcatctatattgcagaattgatataaatagtttaatcttatatcggggtttggatattttattataaaaccttctctatcttgattcttagtaatctcattactcccaaaaggcactattgtatttccatttgtatcaaccaaactatactgcttttcagaattcttttcctgaacaatgatattcattcctataccatttttgtcactgcaacactcatcgtacgaattatattgaaatggtgtaatcacattaccggagatgtcaatctttccccatttttcaactccgtcaattattttacttgcgggaattgtttcatcaacaagaatagatgaggatatacaattatattcgaaaggaatgagtacattagacgctttatcaatggcgcccatatattcaccttggcgcacaagttcaagtccatttttgaaatcatatgcacgatcatattgagcaggcaatatttctccggtggtttcatttatatatccgtattttccgttttgtaaataagcaatcattccatcagaagaacgtatcaagctgttatcaatctgttcgattaaaggacaaattgaatattccggggaatagttatccgcggcaatagcatataaatgaaaagaaaatgataatataaagattaatgcaatggataatatttttttcatggtttcatccccattagttaatataaatttattataacatgaaatttacatatatacaactttttttgaataaatttagatgaatatttaataaataagttaaaattacaaattgatatataataaaaaatactttagtgaatagaatacagcgcagaggactactattatgaacatgagattcttatcaaaagcaatcataaaaaaattgtcggtttgtacttaattaagtttctaattcctgaaaattaaagtccttctttcttaaatttcggtattaataaaatcaattattttttcgcatacatatctttaaagatgatacactattgataattaaatctatttgtgttattatactaatatcaaagtaaaatttgttatttgttttaaaatatttttacatagagaggatttgtgtagcaaaatggataaattaaaattacagtcattattagatgagtatattaagaataaaaaaattaatgcttcgtactataatgaaaattggtctgagcgtaaagagcgaaagaacttttatcagtcatacacaaaagaaaaacttttacaaatgacagaggatgaatttttcgaatatataagcaaactttggtctatgcttatttggggtaataaaaaatatgttgtggataagctaattgaagataatggttttaaaaccttaaaaaaagagttagcagagcttttatttggttctgcaaaaattgaagtaagatgggattcgtttttaaagtctataaaaggattaggacccgcgacgataagcgaattacttacatatatcaatccaaatgagtatataattttcaataaaactactatactttgtttttcttatcttggtatacctgatatgccaaaatataactatcagtatactggaaaaaaatatgcggaagtatgtaaaattgcaaaggatattgctagaattttaaaagaatccggtgcagaagattatgaccttttggctgttgattatttcatgtgggatgaaattcttccccttgctgaacagaaagaggtgaaaaatgactccatttcagttaaatcaagccctgtaagtgataatgattataaatctctgcatgatgagattaaggaaaaattagttgctatcggcgaacttcttggatttgaaagccgttcagaggtaaagattgctaccggtgcgattgttgatgcagtatgggaagctaaaattggcaatatgggtaaagctatctatgtttttgaagtgcaatccaaaggttctattgatagtttaatattgaacttaaaaaaagcacaaagtaatgcagctgtacaggcagttgttgctgtcgcagatgagacacagcttggtaaaattataaacgaaagcagtggagtaattgatgaaaaatcattgcgcacttgggattcagaagatgtcttagccgtatttgattcgcttgtaagagcccatgagtcaatcaataagcttgcacttgttccggaaagtttttaacttgatatattttaaaatattaataaaaaatggtattataatacatagaaagtatacttgagaaagtaataacttttaataaataaaaaggaatgcggcggcttggagaagtgctgttacgcttattttcgatattttgctcggataaattaaaaatccaaacccgttttaattgggtttggattttttacttggtggaggtgaggggaattgaacccctgtccaaagaagtatcctcaagaggcactacgagcgtagtcaatggttaaaattccctcactgtgcagtccattgacaaactgcatagctcggtagcttcattaattcatggctgggtcaaagctttcccggctcacgttcaccgcatcattgatgccctaacctgagtctgcggtaaactcaggcggacaagctgcaactaggcagctaaagctacgttattatttttagcgtttaattttaaagttgggcttttaacgtggcgcccgccacggctcgctcctcaggcctctacgaccctgtcgaaaccattacacccccatgtgtaaatattataactatttatattataactggctgtttatccagtttattgaaagctccatccatccggttacgccgggtacaaaatgcttttcctcgcatccggtcagcttattgccgagcgacagtccgtgttttccctttgggtatatatgaagttcatactctactccgtgttccagcagagcggacgcgaaccgcattgaactgtatacaggcaccgaactatcctcaaatgtgtgccatataaaacttttaggcgtgtttgaggtcacgcgcttgtccaaaccaaaatattcaagcttttcaggtttgccctccgtaaatctttgcttggtgccgtcgtgcgtttttccgtcgtcttctattataaccggatagcacaaaatcaaaccgttcggtttgttttcttctcctgccgcttccgaacctttctgtatcataggcaagtcccaatatactcccagtgaagcggcgagatgaccgccggcggaaaacccgcatacaaaaattttgtccgggtctataaaatattcatcagccatagcccttacggtcttgacggcttttgaaagctcgcatgtaggagcaggccagcctgtaggctctattgagtaatcgagaaggaatccatgaaatccggcagcgcagtatttaagcacaatcgtctccgcctctctgcttgaccttgagcggtatccgccgccggcgcatacaataacagccgggcgtttgttccatagggtttttgaaacaagctcaggttcaagaatatatgaggttagttttgccgtttcattaggttggtttgaagatagtccagcataatccaccgacatatcaaaacttttgataatcattggtcttcctccatagaatcaatacaactatttgcagagctcagccacaatttggtttattaatttgccgtctgctttgccctttaactcgcccattaccgatttcataatcaagcccttgttgccggaagctagtacgtctgagaatttttcgtttataattgtctttatttcgtcagcggacagctgtttgggagcgaattcactgattatatttactttctcattatattcagccagcagctcggttctgtcctcaggacatgtctccacttgctccttggcggttttaagctcctttaaaataacagtttcaaccattgattccggaatatcgtcccggcatccctcgtcaatagcaacctttttaacggcggcaattagcccggagattgtgtcttttctgttcttctcctttgccttcattgcagcaatcatttcggtttgtaagtcttttatagtcatgatatatctcctaactccgcggttttatccacggttataattcttaatggcgcggtctatgtttcttttagcgtcacgctttgctatagcgtcacgcttatcgtaattctttttacctctgcacaaacctattgaaactttaacaagctgttttttaaaatataccctcagaggtataagcgtgtagccctgctgctgggttaaaccgataagacggtttatctcacgcttgtgcagaagcagtctgcgcgctctttcggggtctttgttaaatatattcccgtgctcgtacgggcttatatgtgtgcctatcaatatggcttcgcctgttttgagtgaaacatagctgtcttttaagttaatctttccggcgcgcaccgatttgacttcggttcccaaaagttcaattccggcctcgaattcttcatctataaagtaatcatgaaaagcttttttgttttgcgctattactctgtccgccggttttttgtcagccatattctcacctcttttggattttaactgtgtaaaaaaattttgttctgaaacaattcaaacaaaaaatcttatctgtttagcttgtacattatacttttatttttaacaaaagtcaagtgtattgtcacagtaatttgatgaaaaatccgcctaatttcggcagtttttaaatatgtttacaaatctctcacccttgactttcaatacaatacgtgttaaaatatacattaaattattattgggcaattttacccaaatttatcttgttttgtaattcagcggaggatctttatgtttttatccgataagtggaaagattatgaacttttggacgcgtctgacggcgaaaagctggagcgctggggagatgttattctgctcagacccgaccctcaaatagtttggacagtgagcgaggcggacaagtcaaagttatggagagcggcggacgccaggtatgaccgaagccatactggaggcggcagctggaagacttttaaaaaactgccgaagtcctggactatagattaccgtgaactcaaattcggaataaagcctatgggatttaaacatacggggcttttcccggaacaggctgcaaactgggactggttttcagatataatcaaaaacagcggcaggcctaaaaatgaggtaaatgttttgaatcttttcgcgtataccggaggcgctactatggcggcttctgctgcaggagccagcgtttgtcacgttgacgcggcaaaaggcatggttacctgggctaaggaaaacgctgttttatccggtcttgatgaaaggcctatcagatatattgttgatgatgtaaagaagtttgtggagcgtgagttcagacgcggccgcaaatatgacggtataattatggatccgccttcttacggcagaggcccgggcggcgaggtctggaaaatagaaaatgagctttttggtcttattgaatcgtgtttaaatgtcatgtctgacaatcccctgttttttttggttaattcatatactaccggaatgtcgggcaatgtaatgagcaatatttataaactcacgctctgcaaaaagtttggcggagaaattgatatagatgaaatcggtctgcctgtaacaaacggcggacttgtgcttccatgcggctattcagcacgctgggttaaaagataattgtatttaggggtatctctttatggaagatataataactgtcgacaacttaatatttgaatacacggacgaggacaccggagagaaaaaccgtgtgctcgataatgtgagcctgaacgttaaagaaggagaatttttagcggttctcgggcataacgggtccggaaagtcaacacttgcaaaacattttaacgctattttgcttccaactgatggcaaggtgtttgttgacgggatagatacttctgacgaaagccggctttttgatatacgcagaagggtcgggatggtgtttcaaaaccctgataaccaaatggttgccacaattgttgaagaggacgttgcgtttgctcctgagaatttaggggtaccgcgcgaggagataagagagcgtgttgataacgcgctggaaactgtaggaatgaccgcgtttaagcggcatgcgcctcatatgctcagcggcggtcagaagcagagggttgctattgcgggagttttggctatgcagcccgaaatattggttatggatgagcctacggcaatgcttgacccgaacggcagagcggaagttatacaaacaataaaaaagctcaaccgggaaatgggcatgactgttattctgattactcattatatggatgaggcggttcaggccgacagggttatagttgttgacagcggacacatttctatggaaggcgctccccgagatatttttccgcaggtagataggttggtggatttgggactagatacacctcagtccacatatttaatatatatgctcaataagctcggtcttgactttaatccgcgcgttcttaatgataaggagtgcgctgaagaattaataaagagactaaagaagaattgctgataatttgatatgattttcttatacggaggcaggcattaatgattaagcttgaaaacgtaagctatacatatatgaagggcggtccatttgaaaaaaaggcgcttgacaatgtgagcctggaggtgagacccggtgagtttatcggggttataggccatacgggttcaggcaagtcaactatgatacaaatgttgaacggtctgttaaaaccctctgagggcagagtttttatagatggaactgatattaatgataaaggcgtaaatcttcgggatataaggtttaaagtcggattggttatgcagtatcctgagtatcagctttttgaagaaacggtgcttaaagatatttcatttggtccggctaatatgggtctccctcgtgaagaggttgaggagagagctagatttgccgcaaacatggtagggcttaatgacagtctgcttgaaaaatcaccgtttgatttgtccggcggtcagaagcgcagagcagccattgccggggttttggcaatggagcctaagattttgattttagacgagccgacggcagggctggacccggcaggacgggatgagatattgtttaagataagagatatgcacaagaggatgaatttgacggttcttttggtgtctcacagtatggaggatgttgcaaaacttgccgacagaattcttgttatgaacggcggccatgttgagatgtttgatacccctgataaggtgttctgcaaaagcggaagacttcaggagattgggcttaatgttcctcagataacgagggtgatggataggctcagagaagccgggattgacgttccgggaggtatctacactaccggggacgcatacagagtgctggctcctatgttgaagtaaaatatttaatacagttttattgaaaggcggaaaaatgctaaaagatataacactcggtcaatattttcccgggaattcttttatccacaagctggacccgagaactaaaattttaataatgatagcgtatgtggttttggtgtttatcgttcagaatttttacggctatttggcattggcggtatttttggggatttgtgtttttgtgtcaaaattgtctcctaagtatttaataaaagggcttaagccgataatgatatttattgtgttcacagggctttttaatttgtttttgacctcaggcacgcccgtatggcattggtggatatttaccattaccaaagagggtatacgctttgcggcgtttatggttctgaggttgatttttctgattttaggcacatctctattaactttgacaacttctccgatagcgctgacagacggtctcgaatacctgctgaccccatttaaaaaaattcatgtcccggcgcacgagatagctatgatgatgactatcgcgctgaggtttataccaacattgctggatgagacggataagattatgaaagctcagtctgccaggggtgccagcattgacagcggaagccttctgagcagggcaaaggccatggtgccgatacttattcctctgtttatcagcgcgtttcgcagggctgacgagcttgccacggcaatggaatgccgctgctacagaggcggcgagaacagaaccaggctctatgaacttaaattctcaggaatagatataatgagctggttatatgttttaatattgcttggaataattctttcactgaattttggatttggaagtttttaatatggaaaatataaaaaatattgcaatgagaatcaggtatgacggaacaaattaccacggctggcagtctcaatctaatggggtaactgttcagagcactatagaaaaggctctttcggaactgaccgggtctgatgtaaaagtcacaggctgcagcagaaccgacgccggcgtacatgctttggattatatttttaattttaaatcagaaacaaaaatcccggtggaaaaactgccgtacgcgttgaattataggttagaagacgatataaccgccctggaagcctgggttgcggcggatgattttaattcgcgtttttctgtaaacggaaagcggtatatttataatatttggaacagcgctttaaaaaatccatttttaaatagatatagctggcattttccatacaaattagattttaaaaagataaaagatgctgctgttttttttgagggaaagcatgattttgctgggtttatggcggcaggaggacagcagaaaacgactgtcagaactattagcgtatgcggagcggagcagagcggggagtttcccgaactgctgacaataaccgttgaagctgacgcattcttatataatatggttaggataattgttggtacgcttgcggatgtaggcaccggcagaattgaggtttcggatattcctgaaattatatgcagtaaagacagacgccaaggcggtattacagctccgcctcaggggttgtttctaaaaaaagtatatttatagctaaggatgacctgatatgaaatttgatctcaacaaagagtttagcttctctcagataggcaactatttaaagagaaagtatgactccgcagtaaaatttataaaaaagatggatggaagcagtataaaaaatattactgtcaaaggtaaggtcgtccgtatcaacgcaattcgtttaagctttatcgcggcggttttagcagtgcttttggctctgtttgtaaatattgttatagttccgaatactacataccgtgcatattcggatttggagtttgatacgggaggacagtatattcagtatgctttcggcaaagatgttttgctgcttaacaaaagcggaatcaaggatgttaacaacaaaggcggagacgtttggaatataaaaatgacgctcacgaatccgacaatagatattgccggaaaatatgcgcttttagcggacctggacggaaataacagcttgaatctgtatgatacaaatgggaacaatatagtaagctatccaataagcactgatatattgtcagctaaagtcaataaaaagggatttgcggttgccgcgcttgccgaagaaggttataagggcacagtggtggtttttaataaaaaggctgacgaggtgtttaaatggaacagcggagagggatatataacggacgttgatatatcaaaagacggcaagtatattgccgttgcgcagatgatgagcgacggagacgagacttattcaaagattcgggttatgaatacgtcaaacggacaggagagcggcactgcaatttgcgaggacactctcattgcgaaaattaattttgataaaaacagcaatataactgctgtcggacaaagcaagatatttggattttcaaaaaaagggaataagaattttgaaattgatttagccggaaaatcacctgtcaaatatgatgttgaaaacggtgataatctgttgttcctgtgcagggacagcaggggaaactcagtgcttgagatttatagtatttcgggcaaatatctcggaagctataccagcagtgacgagataaaaaacattgccggttataatgacaatataatcgcagcgacttccagaaaccttatatgtttaaattataaaggaaaacttaaaaaatctatagagatatcacatgatataatgagcataggtatatatgggaatgaacgcaatgttttggttctcggagggaataaggctgatattgtcaggataaaataacagagtttgtcggaaaatattctaggaggtttcacggtgcttgatattctaacagcatgttttttcgcaatttttatctgggtgggttataaaaacggttttttaaaatcagcatataaggtagcggcttttattgcgagcataattttggcatatatcctttatccttatattaaggattttatagtcggaagcgcttttggagatatggttcgttcaattgtgcagacgaaatatgttgaacccaaaatagcctcggaaacattaactgcgacggcgctgccggagtacatgagaagcatggtggcaaccggacagacggctttaaatgacgctttaaccagctttattacaaatttggttttaaacttgatatcatttttgtcggtgtttattataacccgaattttaatttctattataggaaaagtggttaatatcgtttcaagacttcccgtgataagattttttgacagagcggttggagtggtatttggaataattgagggtgttatcataatatatttagttttggctcttgtatatgctataaccccgctgagggagaatgaaaatactcaaaaatatatttcagaatcaaccctgacaaaagctatgtatgaaaacaacccgatagtgcagttggttacgccgacggattatgataacttatcgtcaaagtaggaggatttaatgaacaggaaaagcagctccgctgaaatggagaaactagaaaatatgaagatagttgagctcagagaatatgctaaaaatctgggtcttaaaggcgtttcaaaactaaagaaacaggagcttattgaagcggtttctgattttattgaaaatgaaaaagcggaaaaaactgaagaggttaagaatccgtcagaagcttctaatcaggcgttgcaaaaaaataatgtttcagaaaaggaacctcagaataacagccgcccgggcggagaaaataaaaatgataaaccggctgttcagcctgtaaaaaatgaagttatagaatacagtgacccggttcgccgcacaaacttaatgagcggagttcttgaggttcttgaagacggatatggatttttgaggtcggataattaccagtcgggtcctgacgatgtgtatgtgcctcaggctcagattagaagattcagacttaaaacgggggactatattgtcggaaacacgagaatgcagcatgagggtgaaaagtatcaggctcttctttatgttcagtccgtaaacggcgataaggtagacgtgtcaatacgcagaaaagcttttgaggatttgacgcctatctatcccagagagcgtttgaaacttgagacagtcaagacggattattctatgaggataatagatctaatagcgcctgtcggaaaaggtcagaggggaataataattgctccgcctaaagccggaaaaacaacgcttcttaaaaatatagcgaatagtataacccaaaataatcctgacgttaatttgatagttctgctgatagacgagcgccctgaagaagttaccgatatgcagagaagcataaagggcgacgttatatattccacatttgacgaggagccgcagaatcatacaaaggtggcagagatcgtattggaaagggcaaagcgtttggttgaacataaaaaggacgttgttatactgctggacagcataacacgtctggccagagcgtataacttaactatagctccaaccggaagaactctttcaggcggattggatcccggcgccttatataagcccaaaagattttttggcgcggccagaaatattgaagggggcggaagcctgacaattttaggaaccgcgcttatagagaccggcagccgcatggacgacgtgatttatgaggagtttaaagggaccggaaatatggaggttcatcttgacagaaagttacaggagcgccgtgtatttccggcaatagacatagccaaatccggcacgagaaaagaagagctcttgttaagtcagagagaaaaggaagctgtttggcgtatccgcagggctcttgtgggacagaatacagcagatgtaacagagactatacttagatacattgtaggttcacagaataacgatgaatttattagtgtaatagaaaaagtttttaagtaaacaataaaggagaattgattatgaagaaattatccctggttttagcggcgatgattgctgcttcatcaatttcattttatggaacggcggcatttgccgaagaaaccggccttgattatgatggcagcgttaatgttgcttttggaaatactacgggaagttcaagcgcaaattccgagacgggaaatccgccttcttggataaaggatatatattcgaccgcaactccggctccggcttcgacaaaagacccgaacgctacgcctgaaccgactaagaacccagatgccacgcctgaaccaacagcagcgcctacccaaaaaccgtcggcgacgcagcctcctaatgaggttagagccggaacaccggaagctgatgttgttaaggtgccaatattgttatatcatcatatatcggatgattttgacagctcaaatgcgatatctattatctcaccaagagattttcgtttgcatatgacggcgattaagacgcagtatactcctatatcattaagagattatgtggattttgtgaaatgccgtgacggttctaagactatcccaacaaatcctattataataacatttgacgacggatactcgtcaaactatgaagtggcgtttccgattttgaaagaactcgagatcccggcgactatttttgtagtaaccgatacagtaggggctacaaaggaaagcggaaaggtgaattattcacacttcacatgggagcaggcaaaagagatgcaggacagcggtctcattgatatagaatcgcacacaaacgaccatgttaaactcggcgagctggataaggacactcttaactacgagcttcgcaagtctaaatatttgatagaaaagaacttgggaaaaacatgcgatatgattgcatacccctacggttcatattctgatattgctatcgacgcttcacacaaggcgggatttattgctcagtgtttggttggagacgatgcgacggatatagattatgaggtgaatataccgcgggacggggttgagaatatgacaaggataactgtcagcgggcttatgggaaacgtcaatgtaattgagcttataagacaggcggtttcgaataaaattataaattaaaatattaaaattcagaaaggaaaagcagggcgataaaccttgcaggtaaaagcttatgtcaaatgtaataactgtaacatctgaaaattttgaatctgaagtattgaattcagaaaaaccggtattggtggatttttgggcttcatggtgcggaccgtgccgtatgctttctccgattgttgacgagatagccgaagaggttcagaccataaaggttggaaaagttaatgttgacgaacagcaggatttggcgggtaaatttggtgtaatgtctattcctacccttatattatttaaaaacggacagccggtaaacaagtctgtcggcgcaaaatcgaaagccgctttgcttgactttataaaatagaggtgagacaatgtacgacgcagtgattataggtgccggaaccgcaggaatgactgcaggaatatatcttgcaagacaaggcaaacgcgcgataattcttgagggaaacacttatggaggacagattgttaattctctcggggttgaaaattaccccggtataaaaaacatatccgggtttgatttcgctaccgctctttatgagcaggtattggagctgggcggagagatagattatggagaagtcgtggggataaaggttaacgataattccaaaacagtgctgactgccgataaagagtacgaatgcgaacgtgttataatagccacaggcgcagcaaaccgtaatctcggcgttgatggcgaggaggatttagttggtctcggcgtgtcttattgcgcaacctgtgacggagcctttttcagagaaaagaaagttgccgttgtcggaggcggaaacacagccttagaggacgcggaattcttatcgggattatgtgagactgtatatattattcataggagagatgagttcagaggtgaccaatccacggttgaaaagctgaaacaaaaatcaaacgtggaattcatactcaactctacagtaacggcgtttaaaaagggcgaggacggcaggctgaacggagtggaactgcagaataaaataagcggtgaaatttcagggctggctgtggatggcctttttgtagccgtgggacagattccgaacactggttttttaaaaggcttggtagagttagacgccgccggatatgtcatttccggcgaagactgcaagacaaatattgatggaatatatgcagccggagactgcagaacaaaaccgctcagacagctggcaacagccgccgcagacggcgcagtggctacaatgtagaaaattttgttttaatcgaattttttatcgttaggatagcaatttcaggcgtcataaggcggcaagctgtttcatagctttccccgcagacccgcatgaaatgggcgtttcctcaaattcggcgactaaaccggcacaatctgtaacagcatggttttgtaaagcccagcaccatttgggcactacaaaacaaaaaatcagcaagcccttgtacggcctgctgatagccttattatacagcgtatgccctgaaaaagcaatccccgaaaagctgctaacggaagcagacgcagtctgaacaagctccggcatgagaagtgtgctatctcataccggggctattttcatgcgcggcgggaattccgattccaccgaaaacaatagtggcaagcagggcaaagtgccctgcttgccactattgaaaacgactaaagaaggaatacgtattatgcaaataaggcgcatttaatcagcccggcaaactgggatttgtcatttgtcttttgtttcaaagggtttgttccacgaaccaatttcaataaggtttccttcagggtcagctatataacaggttctctgtccccaaggctctgatgtgggttccaaaacagccgttgctcctttatttattgcatttttgtattccaaatccacctcttcaaaagtatcaacataaagtgcaatttccgaatgaccgttcaggcccttcacatattcatattttttgcttgtcatattctcaaagtcttttctgccataaagcaaaaacaatgtgccatctttcacaagataaacattcgatgtctgctcattttccttaattgcgaagccgagcacatctctataaaatctaatcatagttcccatatcgtttacgaacaatccaaaaccgtctaacctcataattaacctccaaattctaatttgttaaatacgctttatccgcctaaagcctacaagcccataactatctttttcattttaatatggcctcatggaaatgtcaaacagctcatttcgtttcattacttcatgctgctgtttataactgtatgttcgtttgggcactattttaccctttgcaggacggtttctcacatgacagaaatgctgatttcataagcctttccggctgaaaaaagtattttataatcaccaaaaatttactattttctataatatttttttcatctgtttaaagagttcgatatgctttaatatgtcttcatatacctgctctttgccaatttcatttagtatctcgtgtctcataccggcatacatcttgcttcctacataataatatccggcttcctgctgtttggaaaccgcctcgatatgttttttgtatcccagcatacatgaatcttcacagcctgacataaatatgattggaagcatggggtttccggctgttaatgtgttgtcgagatacgttcggttaagaagctccagcaagcccctgtatccgttaatcgtaaaagaaaatccgcacagcgggtcgtttacaaactcgtcaactacgtttttatcactgcaaatccatgcgcttttttggttctcgtctttaaatacaaaatcaaagattccgacaaaaaggtcgtttatcagctggtctttataatggtccccccggagtttggcatatttatcaagcacaggggttatgacgcctgtagagttgtcagagctcggcgcgccgcacagaaatactccggaaggtatataatcgtatgtctttaaatacacccgtgccgctaatgtccccatgctatgggcaatcaggtataggggcagccccgggtaaagatccattacgtactctgatacgcggcgcagatcttcaactatacccgtagcaccgtcttcgtaaaaatatcctaggtcatcacggtttttcacactttttccatggccgcggtggtcatgaattatacagatataaccttttgaagtaaagtatttcataacgtttaaataccgttctttatgttcggtcataccatgtgaaaattgaagtatcccctgtatgttttcggtggtatcaggcgtgcataacattacgctaagtataagcgaatcgtgctcagaaattaattttaacgtctttgatttcatggaattatcacttcccaatatataagctataattatattatagccttaaaatattaattaatcacaactttttgtatacagtcagtatcatagtggtgaaagcggcagcgcctcctatcagatttgagataggctccgcccaaaacacgccgtttacatgcggcgtccagaaaattggaagtaaaactgtcatagggaccacaataattattttcctgaacatagagaaaaaaacagcttgcttcggtttgtccaaagcggtaaagactgtttgagcgcagaattgcagagccataaagaaaaaaccaaaaaagtatatgtgcagagctggaacgcctccggcaagcaaatctgcattctctgtaaaaatccgtataaaaaattggggaaagacagcaatggtcatccaagctaaaacagtatataatattaaaatcacagacatatattttattgctttcttgactctgccatttttttcagccccgtaattgtatccgaggacaggctgggcaccttgtgaaaatccctgaacaggcagaacaagtatatccctgacagatgttattatcgtcatgattccaatatataaatcgcttccgtattgttttagcgtcatattgcagaccatttgaactgccgcgtttgtagcgagcattgtaaaccctgccaacccgagcgacagtatttttttaatccttctggaattaagtcttatcatatggcgaagttttatggtatatgtggcctttttgctgagtaaaaagcctactgtccaaatggctgaagcaatttgagaaatcacagttgcaatcgccgctcctgccacgcccatattaaatacaaaaatcagtatcgggtcaagaataatattgagcatggcgccgatagctatggtgagcataccggtttttccaaagccctgggcgtttattatactgttaagccccagagctatcaccgggaaaatggctcctataaggtagatagtgatatatgaatcagcgtatgggagtgttgcgtcgctcgctccaagaagctttaaaatcggagttttaaaacataagcccaaaacagagattgatataccgacaattataagcagactgcaggcgtttccgagaatactttccgattcctcgccgttgttgcggccgcgctcaattgatatgagcggcgcggctccggcgcctatcagatttgaaaaagccattataattgtaacgatgggaaggcagactcccactccggtaagcgcgtcagtcgtttccacaccgcctattcgccctataaacattctgtccactatgttatatagtatggttatcagctgcgctatcgtcataggtatagctaaacgcagtatatgtttaagaatgcttccctttgaaaaatcatttgcgcgggttttaatatcgttcaatttttaggctcctttccgcaaaattcaaaaaagaggttataaaaccccttttaaatatatttaatttagtcaatgttatatgtcgttgaaacgctgctcaagctttgggtataccttttcttcaacaaaaatataccagtcgagcagatttttggtttcaaaatagtatttttcaacatcctcgtctatatagtagtcgtttgtgtcagacttgcggtttctaatttcgcttatttcttgatttatttgtataagctgaagtctgactgtgttgtaatcgtcccacactgaggcaatctgcggatatgtaaagccgtttaagcattcagctattttctttctgagtaatattgagagaaagtccgccgtatcaaagaatgctttgcactcatgccccaaagcggcccttaaattgtcgagaacatactttgggttggaatcggaattaccgattcttgccatatagtcgttggcgcacacatgaatgatattctcatacgcgtttttaaggctgtttatcggaagaaagaaagtctgaagttcagagccgtactcttcagctaagatatacagttcctttgttttgaggtgaacatagaaaatacgttcccaatattcattctcagtcatctcatttttcctataagagtttattccttcaaacaaagctttgtttgaagcgtctatgctatccttgtcaggggcgccgtcagttgtcttttttatatttttatcattttggacaaccggcataactttagtggtttggtcagcgacagcagttttttgtcttttcatatattatacctacctttcggaagtttaatcggcgatgtttttcttctcagagcgttaacattttcatctgaatagaacagtcccatagcaaaccttgcctcggatgcgggtctgttataaaaatcttcaagttttttcacattttttttggtaagatgttttgtagtgctggggaactcagcgtctataagccgcatcgagtgccaggcttccgagattttataggacatataaactatacaaataagtatacatactccggtgattataacagaggccagtaagaaagaaaatcccatattcattatttttcagctccttctcgtaccctgaaactaactgacagaaataatacaaaagctaaaacgactgatatagtaacagcccaaatattaattttatatactgtttctccaaacaaaacagggtctccttccagcattaaataccccatcatagccaaaaatatcccaacaacctccaagactgcaatgagatatacagccacagagttcctttttcctattaaaatcgacatacccacggcgactactgatattgcaacgacaagatataaaacatcattgtcactgaacaccataatccagtatccaatatccattgtttcagcaacattggtaaacataggtcttaaaataagggggaaaaacgagaatatggcgcatacaagccacacggaaagcattccaaaaaatcttcggtaatcaaaatataaagcgtttccaacttttcggctgctgatttcttcctgaatatttaccaagataataccccccaattgttatatacggcaataaatcctatatgttattacatatttcgacatatttcataataaaaaggtaccataaaacagttagaaagtcaagagcgttttaaatattggaagataattgttaaaatattcactaccatatataaataagtaataaaaaagagccgaattttcggctcaattaaattatattgcaaagtaataaccaacaccgcgtttagtcattatatgttttggctgagacgggtcgtcctcaattttttctctgacgcgcctaacagtaacgtcaacagttctgacgtcgccgtagtactcataatcccaaacatattcaagcagactctttctggaatatattttattcggctgtgctgaaagaaatttaataagttcaaattccctgaccgttaaatcgataagctttccgtttttataaagctcatatctgttacagtcaagagtgaaacagccgatttcaactatatcgttttcaacctcagcctgctgaggaactatatcgcttcttctcatattggccttgactcttgctaaaagttcacgcacgctgaaaggcttggttatgtaatcgtcagctccgagttcaagccctaaaaccttgtccacttcttcttcacgtgccgtaatcatcaggattggaacagaagaagtctctctgatttttttgcagacagaaaagccgtccatattcggaagcataacgtcaagcagtatcaaatcaggtttttcggattccgcctttctaacggcttcttcgccgtcatacgcctcgcataccgtgtatccttcattttttaagttaagagtcaaaatttcaacaatgcttttttcatcgtcaacgaccaagacttttttacccataccggtttagcacccccatagttttccaatgaattatatgtaaatctataccacttcgcctaaaggcggtaaaaaccaaacacaaaacaatgcaattaaaaaataggaataattacatttccattacatatacactaattttatactacttctcttaaaaaatcaaggtttttattaaaatatttttaaatcttttatactatttaaataaacggtaatatatttgggaaaaaataacaattaaggcggcgctgtttaagtttctgcgccgagaacttccggaccattatcatcgattttaaagtataccgcaccgtttttggtttcaaagacttctgttcccaaatccttatatgctttcaaaaccttttctgaggcaggttcgccgccgctgtcggtgattaccgcgtattttgcagagacggcttctgcaagttctaaactttcgtttccgtcctttttgccgtggtggggcaccttaataaaatcgcagtcaagttcaatgcctgaatttaatagttcctctattctctcgctctcggcgtctccggcaaataatagccgaactccgttatattctgctatagatacaattgagaaggcgttgtcgtctccgtcttttttgtatggctcagttctcttcgacggatatagagaaataactgcgtttcccaaagaaatagtcatgtcgtttttaagagttaaaggctcaatattttttgcatttaacgcattcataaagctattataatttttactgtcccttacgtaatcagggataatcacgtttttgactgatgttccgctaacgactgcagctgcgccgccgacatggtcattatcaaagtgtgtgattaagaagtattttatattatctatgccgcaggatttgagatgagctaaaacatcgtctccgttttcaatttccccggcgtctataaccatcgtttccccatcaactgtaagtattattgcatcagactttccggtattgagtatcgcgccgtacgctccgcttgccggtaaattcccggagccgtctgtatacggtgaattatggctccctgtgcaggaggtaagaaaactgattgtaaaaattaatagtatggaaaataaaatgctgggtttaaatcttttcataaaaaatcacctcataataattttggtgtttttcatataatatttctgacgttttaaaaagaaattccattcttaataattttatcatatgttagaaatttaggtgttaatattttgtaaattagccgtagcttactcaatatgtatttataaatcagaactattgataattgattgtgttagtgatataatcaactttataaaaagaacatatggagaaactaaaatgaaggatatatataagactgttaagaatatggcgagcgcagaaatagtcgagaagcgttccagattcatagcgtcagtaaaacctgtggaaagcgagcatgaagccgtagagtttataaacgagctcagaaaaaaatactgggacgccagccataacgtttatgcctatattgtcgaagaaaatggtgtaatgagatacagcgacgacggcgaaccgtcaggcacagcaggaatgcctgtgcttgatatgttaaaaaaagaaggattaacaaacacggtcgttgttgttactagatattttggaggaatattgctgggtaccggcggattggttcatacgtattcaaaaagcgcaaagaccggagttttagcggcaaatattttagaaatgatactgtgccgcgagctttctgttatctgtgattacaatatgctgggaaagattcagaatgaactgcacagctgggaatttatacagggtgaaacactatattccgacagcgtagagctttcattatatgttccgataagcgactgcgccggattaaaggaacgtattgtcgatataagcaatggaactgttaaaattatagaaggttcagaaatctataaggagaaagtttaaacaattatatgaaaataataaaagttgagaacaataaaaagaaatacttagatcttcttttgcttggagacgagcaggaaagcatgatagatttgtatttggataaaggcgatatgtttgtcgccgctgacaatggtgttaaagccgagtgcgttgttgtaaagtgtgaagacagggtgtatgagcttaaaaatatcgcggtcgctcctgagtttcaaagaatgggatacgggaaaaaacttgttgagtatatattatcttattataacgactgcgatactatgtacgtaggaacgggggattctgagaaaactcttaatttctataaagcgtgcggatttaaagagtcgcatagagttaagaatttttttgttgataattatgaccatcctatgtttgaggatggaaaacagcttgttgatatgatttatttaaaaaaggagacaacaaatatggataagtttaaaaagattctaagcggtgagctttatgaccctatggaccctgaaatagcaaaggaacagtttcctaaaatagataaaatcatattggagtataataatataagcataaatgatactgaaaagcgggaaaaaatgctggcagaaattttaggccgagccgggaaaaattgttttatactcagcccattctccgctacatggggatgcaatacttatgttggggataacttctttgcaaatttcaattttacgctgatagatgatgccgaggtacatatcgggaataatgttaaattcggacccaacgtaactattgtaaccgccgggcatcctatatatcctgaactgcgtgaaaaggggatagagtataatttgcctgtcggaatcggcaataacgtttggataggagcgggagtaatcgttctgcccggagtgacaataggagacaacagcgtcataggagcaggaagcgttgttacaaaagatataccgcccaatactgtggcggttggaagcccgtgcagagttatgagagaaatcggcgaaaaagataaaaagtattactacaaagatatggaaataggcagcgagtggaaataaagtaactcaaaatccttagaggttcagcggtttttgtcagccaaacggagcgtttgttgtgcagtcttatttatcacggtataataaatgagtaaaataaagtaattttagacggcaatgtaataaaaatgagccgggaggtgataaaatgtattgcagaaaagtaggagagttaatacaaaagctgagaaaagaaagaggctggacgcagaaatatttggctgacaaaatgaatatcagcgacagaaccgtttcaaaatgggagcgcggactaggtctgccggatgtgggactgcttaaaaatttatctgatatattcggaatagatttagggaaaatgctggacggcgatttaaacgaaagagagactgacggagggaatatgaagaaagtaaagttttatttctgccctgtttgcggaaatctagtaaccgcggcaagcggcgctgacgtgatatgctgtggccgcaaacttgagcctatgatagaaaatgggatagacgaaaaacatcttgctgaagttaaaataatagatggggagtattatatatcgtttgggcataaaatggaaaaggagcattatataaattatgtgctgtgtacgggatatgacagggctttggttgtcagactgtatcccgaacagggcggagaggttagaattccgcggatttccggcgcaaaaatttatttggtgtgcagcagagacgggctttttaggattatgtaattaaagaaattaaaatgaatcaggtgatattttgaacgatactataaaaatttgtataggaataattattccgcttgtcggaacatctttgggcgccgctatggtgttctttcttaaagataaaatgcagccggtgctgcagaaagttttgctgggttttgcctcgggcgtaatgattgccgcctctgtgtggtcgcttattataccggctattgatatggcggaagagaacgggtccattccgtgggtgccggcggcagttggatttttgctcggtatcggatttttgcttctgctggacagtataacgccgcatttgcatcttaattccgataaacctgaggggcggaaagcaaaacttcgcaaatcaacaatgcttatttttgcggtgacgcttcataatataccggaaggtatggcggtaggcgttgtctttgccggagtgctcagcggaaacgccgccatttcaatgtccggcgcgtttgctctcgctataggtatcgctattcagaatttccctgagggtgctattatatccatgcctttgcttgggaatggaatttcaaagcgccgctcctgtttatacgggattctttccggggtagttgagccgataggcgcgataataactataatactcacatcgttgattgttccaatacttccgtatatacttgcatttgcggcaggcgctatgatttacgttgttgtggaggaactgattcccgaagcccaatccggagaccacagcaatattgccactatcggcgttgctgttggttttacaattatgatgattcttgatgttgctcttggataaaactatatattatggattataataatgtgtatactgaaattatagtataaaggaggaatacactttgaaaaattcaaattgtgatgtcaatttaagaaaagtggcggtaatcggatgtggttttgtgggttcagcttcagcttttgcgctgatgcagagcggaatgttctctgaaatggtgctgatagatgttgataaggacagggcggagggcgaggctcttgacataagtcacggcgtgcctttaaacagaccgatgaaaatatattccggcgaatataaggacgcatccgacgcggctatagttattattaccgccggcgccgggcaaaaaccgggagagaccaggcttgatttggtgcataaaaatgtcggtatttttaagtcaataattccgcagataaatgagtgcaattttaaaggtattctgcttatcgtttcaaatcctgtggatattttaacgtatacagctataaaattgagcggtttgcctgaaaataggataataggttccggaacggttcttgatacggcaagattaaaatatcagctgggtcagcatttgggggtagacagcaggagcgtgcacgcgtttataatcggcgagcatggagacagtgaaattgcggcatggagcagcgctaacgtttcgggtatcccaattaattcattctgtgagatgagaggttattttaatcatgaagaagcaatgataagaatagccgacagtgtaaaaaatatggcttatgaaatcatagaaaagaaaaaggcgacatattacggtatagctatgtcggtaaagagaatatgcgaggctatactccgcgatgaaaaatcaattttgcctgtgtcgtctatgatgcatggggagtatggtatagaaaacgttgttctcagtatgccgtcaatagtcggaaaggacggtatagagacaaaggttccgataacagtaaatgagaacgagtgcactcatcttatgaaatcggcaaacgctctaaaagaagtaatttctgaacttgaattttaataaaaacaaaacaaaataaaacggaaatgtgtaagaggcggaagaatagattgataacctgacataattataaaataaaaaagttcttttgcacatttccaaatattaaaagggagacgcggtacatatgtttgaatcaagatgcggaatcgagtgcgattcctgcgaaagaaaagaagaggttggctgtacgggatgtttaacgatgaaaaaaactttttggggcggagaatgtgaagttaaaacctgctgtgagagcaaagggctcaatcattgcggtgaatgcgaagaattcccgtgtgaaatggtctctaccatgggcgttgaaatgggatttgacccaaagcccagattggaaaactgccgaaaatgggctaaagaaaaataatctgtacatatgcgcaggtccaaattcggacttgcgtattttattgttttaatttctgaacgtatgtgatataattgcagaataataaaatgatataatgaggtgaataaaatgttagctgtttacaaaaataataaaaatttggcaaaaaaagatatttccggagaactaaaaccatttttttggcttggggatacagcgtggctgctagcgcagaaattgaccgctgacgaagcaaacgtatattttgcggacagagccgaaaagaattttaatgtaattcagacagttcttgtacataatatgaatgttgaagagccggatgaaaaaatcacggccgtactagataatgatttttctaaaatctgcagttacagcggctattgggaaaaaatagatacccttgtggagatggctgccggctatggcttgtatatgggattgcttccggtgtggggagcgatggtcaaaaaaggatatttaaacgctgataatgcggaaagctatgggaagtatctcgctgacaggtacggacagcacgagaacgtcatttggattcttggaggggatataaggggcgagaccggatttgatgtatggaacatattaggaaatactataaaaaaatatgcgccggaacagctggtaacattccatcctttcggcagaacctcgtctgctatgtggtttaatgactgcggctggctggattttaatatgtttcagtctgggcacaggcgttatgatcaaagttcgctgggcttttgggacgataataatgtttcagaagatttttacggggaggataactggagatatgtaagaagagaacttgcgcgtacgcctttaaaacctgttcttgacggagagccttcttatgaaaatatacctcagggactgcatgatttttcacagccgttatggaaagcaaaagatgtaagaagatatgcgtactggtcagtgtttgaaggagcctgcggccatacctatggggataatgctataatgcagttctatagggaaaacgacaaagacgcagggtataatgttaaaacctgctggagagaagccctgaacgacccgggttcagcacagatgggatatttgtataatcttatgacgtctgtaaattttcaagacggtaaacataacgataacttaataaataacggcggtttcacaaaatacgaccgtatcacggctttttcaggaaaagactttgccttgatttataactacagcggccgcagttttgaattaaatcttgaagcgctggaatttaaacctgtatcagcccgttggtatgacccggcaagcggtgtgtttttagataaagagaccgccttttcggatgtgattgacgtaccgaaaaattcctccggtgaatccgatatgattttggttttgaaatagtaaattttgggcaggataaaaacagaaagttatttaaatagtaaatattattgataagtttattaaaacgggcataaggtaaaattggggcgtattggtattataacaaaacatttgaattttttgttaagatatcaataatttggttgtatttttattttatgtatgatataatcactcattgtatcaatattaaaatagcatttaaactggtgttatatgtgtatcaaaattttttgacaggaggcgacagagtgaaaaaatatttaaagggtatcggtttttacttgctgttgtttttagttatccttatggtattttttatgacgagagttacgcctaaacaggataaagacgtatattcagaattagtaagagatatccaaaatcacgaagtcagcgagattagtatagctgacgatgttgctacggtaaagatgaaaaacagcgattcaataattaaggttgaagttccgggttatgaaacactgaggagcgacgtcggagacgagatggaaaaacagataaaggatgggtcacttaaggttgagactcctcttccgtccagtatgccttggtgggtaacattgctgccaacgcttggaatgatcttgcttttcgctgtattctggttcatgtttatgcagcagtccggaagcggcggccgcggtatgatgaactttggaaagagcaaggcaaagcttaccaacgaagggcagtcgaaaaaaacttttgccgatgtagcaggcgaagaggaagaaaaggccgaacttgaagaaatagtcgagtttctaaaaacgccggaaagattcaggcgtttaggagccaggataccaaagggcgtacttttagtgggccctccgggaacaggtaagactttgctcgcaaaagctgttgcaggagaagccggagttccgttcttctcaatatcaggttctgactttgttgagatgtttgtcggcgtgggcgcgtcgcgtgtcagagatttgtttgaaaacgctaagaaaaacgccccatgtataatttttatagatgaaatcgacgcagtgggccgtcacagaggtgcaggacttggcggcggacatgacgagagagagcaaacccttaaccagttgttggttgagatggatggtttcggtgagaacgacggcgttattataattgccgcaaccaataggcctgatatccttgacccggcgcttttgagacccggcagatttgacagacaggtattggttgacgcgcctgatgttgtcggacgtgaagcgattttaaaagtacacactaaaaataagcctttgggcgatgacgttaaacttaatgttttagctaagactacaatcggattcaccggcgcagaccttgaaaaccttgtaaacgaggcggctttagctgccgcgcgcgcaaataagaaggttataaacatgatagaccttgaagaatctatcatgaaagtggttgccgggcctgaaaagaaaagcaaaaaggtaactgataaagaaaagaagcttactgctttccacgaagccggtcatgcggttgtgtcaaagatgcttccgacacaggacagggttcatcaggtttctataatccccagaggcagagccgggggatatactttgtcgctccctaaggaggataccagttataacagcagaaccgaaatggttgaagaaataatagttttgctgggcggccgtgttgctgagagtttaactttggatgatataagcacaggcgcttcaaatgatttggagcgcgctaccaaaattgccaagagcatggttacaaagtatggaatgagtgaaaagctcggcgcaagaacattcggcgaacagaacggcgaggtgttcctggggctcgaagccggacattcggctgattacagccaggaaactgcagctattattgacgaggaaatccataggattataagtgaatgctatgagagatgtaaagtaatcctcacagaaaatatggaaaatctcaaaaaagtggcggaactcttgcttgaaaaagaaaaaattgaaggcgacgagtttgacgctctgttccaaacaggcgacgctgaggcgattgacgcggcgcttgaggttatgaatgatacggataacgccagaaaagagaaagatataaaagaggaaaccggcgacgtttccatgaagaagacagaatttaaagaaaaaccaaacgcttaaataaataggtgccgtacagtttgcggcacctattgttatgtaagctttaaagagggatatattatgttgaatataactttgatttgcgtcggaaaaataaaagagaagttttattgcggcgccatcgacgagtacaaaaaacgtctcagcagattttgcaagcttaatatcatacaggttaaagatgaacccaacgaggacgggcagcagaaaattgttttaaataaggaagccgagaagattgcggcgaaaataccgaaaggcgcatatataatttctctttgcgttgaaggaaagcagctttcatcagagcagctttccgaaaaaatagagtccctttctgttaccggggaaagccatatagtatttataatcggagggtcactggggcttgatgactgcataaaatcaatttctgatttaaagctgagtttttcaaagatgacgtttccgcatcagctgatgagggtaattctgctggaacagatatatagggcgtttacaataagcgccggaataacctatcataagtgattatattttataaccaaactgtcttattttgataaacctgcaaggtgctgcacctaaaaggtgcgtgtaagccaaagtggtttgtattgatgaacctgcaaggcctgtgcccccacctttcagactaactattaaaagtcaatagaaaaataaaaaaagttaaaatcttttcggtcaaataaggaaactagaaaattgtatgtcaaataaagcaatagtaaattgcttaaaaaaatagtattaaaaatacagtattacataaactcaaacggcttggtaactctgacccgttttctgtaaatgatagattactctcactagtttttttactgcatgagatattgcaacattgtaatgttttccctcagttcgcttttttgccagataattcttgaaggtttcatcccaatgacatacatattttgctgcattgtataatgcgtaccgaaggtaacgcgaacctcgtttctccatgtgtgaatagctattggttatttgtcctgactgatacgttgatggtgacattcctgaatacgcaagtattttatcaggagatgaaaacttactgaaatcacctatttctgctactatcatagctcccattgtgtaactgatacccgggatagacagaataggcgtgtttatgttatccataatatgcttgatttctgcttctatctcctcaatttctgctgtaagttcttgtattagctttatggtatgctttagctcaagagattttgctggcatgtctgaaccgattgagttttttgcggcttccctaaaaccaattgcagtatctttgccatatctgcctctagatgcagtatgcagcaggtttgtaagcttcgttaagtgggcttctgcaatatgatgggctgacgggaactctgaaagcatagtatagacagattttatatgcagcgaaggaacaagtttttcaagttccgggaaaagtatgttcacaagccgggaaacagtggttttgagttttgctctttcagaaactttataaaatctgtatctggttagtgactttaattcttcgttgtgatataatatatctgagtaggactttaagtctacattagacattaacatcatagcgattgtatgggcatcaattttatccgttttagtctttctgaggctgagagactttctgaagagattggtatgtaatggattgataacaaaggtagtcaaacctttatcaagaagataacccaaaagattgtatgagtaatgtcctgtggcttcaagccctacttttactttgttaaaatcttttgaaacagattcaattctttgataaagaaaattaaaaccttctatagtgttctgaatagtaaaagcattaaataaaacctcgccgtcagaattgcaaatgaagcagtcgtgcttgtcctttgcaacatcgataccaacaaaaatcatactaaaaactcctttgaaaaaatatttgatactgttccacagatactctttacgattgtaacctcgttctaaataaaccgtcgtgcggtatctaactaattaacaaatgtataaagagactgtggttagagccttcaagaaaccatcaagtggtaggtgggtgtaactaatccacagtatctaataacattatagcacatgcccttaaaatcgaacaatattaactactactttattatacgaggtgggtgtgatactaaataacttgttttgccattatctacagtgtcaattgtggctacacttttgtttaaaagtgtatgttatataagccatataatgttatacaaactataaatgccaataattaacatagttgttatataataaattacttagttgtgatgtattgtgaccccgccggtatggtgggtgtgatacaaattgacttgttttgccattacctacagtgtcaattgtggctacacttttgtttaaaagtgtatgttatataagctatataatgttatacaaactataaatgccaataattaacatggttgttatataataaattacttagttgtgatgtattgcgcatttatgcgccgcgttaggtgagctatcatccgaacacgcagtgttcaatatataaatttaataaatatattttgtttattaaaaataatatatatcaactttgtatatgaccccatataatatatattattttacttataataggtgtttgaaccatttctttttctggcaagaaaaagaaacgcttcaccaaagaaaaagtgcttgctcgcttaggtcgcctgcggctccaaggggcgctcgcaccccgctcatttcaccatgaagccatggcttcatgatgaaaaaagccctactactttcccgttgactttgtgaactgccgtgaaaaaagatttttcgagttcctattagtttaacttatcaaaaaactaagttttcagcttttataatacataaaaaaagtaggttttttagtgaacctcggtaggcttgcgctagcaagcgcgttaggtgagctaccatctgaacacgcagtgttcaatatatttgtaaatattattactttaatgtggatttatttcatttgtgagacttaatatgtaatcagttgatttattataaaagtctgcaagtttcactggaaaatgtaacagtatagtttgaaaccctctctcatatcgagagtataccgtttgttgtattcctaatatttcagcaatttttgtttgccctaatcctgcatttatacgcagagttcttcatctttttaaatacattttattacttcctctacttatcttctaattttttctcttcttcatctttattaaaataggacgatggcaaattaagattaagcaggtcgccgggtttaacttctaaaatatcagcaatattgaagaatacttctaaagaaaattaggaagatatattaggagcttcaatagaactaagatgagaacagctgatttgtgccctctcttcgagttgtattgggtgtagcccttggcttttctcaaaactgaaattaccaatcccagctcaacgaaagggttcctgttttcaaaacctgcttcttttttcataaattatattatctttttttaaattattatttcaaaaattattaacataaatttatatgtaatattaaggcagttatagatgttaactgtttaaagtataatcgccatacatattttttattttaattttgttgcaaattatgtcattttattatataatttttcattaatagctttttagatgattaaattataattttatagagtaatttgattttaatataataaatgtgttattataccgcaaaaaaatatgccgagtattttacttatattgtggaaaattatcgcttgttaacaaaaaggagcaaaatgtcttatgcaaaacttacaaatgacagaaagaataaaactaagagctaagcaaaaaggaatttcaattaaataccttttagaaaaatgcggtataaataaaggttttatttatgatattgaaaagcaaaataaaataccgtcagtagataaaattgaacgtattgctgattgtcttgactgctctgttgactatctcctcgggcgtactgatgtaatagaaattaacagcagtgcagtaaatactgaaaacaataattttaaagttttataatagttttgtagcagttaaactgctcttgattaattatattactatctacaggtgtaatatggtatagtcatatgaaacttataactgttatgaaaatactgcatttctaagtttagttgttgtcgacggtgaaatatctatatttagatttttgcaataaatgcacaaaatatggaggttaaatttatgtatatttccggcaaggttgctgatagaattaggctagtagcaaaaatgcgcaatgtcaccgtcaaaaaaatgcttaaagatattaatttagggcttaatactatgtcaaatatgaagaattcaatgcctaaagctaataatcttgcaaagattgctgattaccttaattgttcagttgattatttactcggccgtaccgatgtgattgaagttaatagggacggaaatgtataaaataatatttaagttaaagtattatattttaaatattaaccgtagttaaaattaactttattggctttagaatttatttaatgtactgcatttgacgagtaaacgcaacatgcgaaccatttgtttatatacaaatggttgatattattttattattaagtttataaaactaagagccgcgcaaatttgcgcggctcttaataattggtgtttggaggttaaaagtgcattccgttcatcatcttttttgcttttttaacattcttcttgtcgagcattagaattcctattccaaacactgttccaagaagcataccggtactgaattttcccatgggttctcctttccaacaaattctactatgtttaaatagatttgtaataatttcattaattatcacaataatattatttgtagattaaatctaaaaaatccaggaatttttgggaaaatatttacatgcgcagagtaaatttaccttgacgtattgacaaatatgttgtattatctaatatgatatgttatcgattatgataaattgtccgtgctgtaacatttgtcagcgcgaaaattaaattattccggaaggatgataataatggcaaaagtagtaccctttaaagggcttagatataatacagaaaaatttaaagatttagatatggttacagctcctccgtatgacataatttcagcggaagaacagcaggagctttataataaggatgagtataacgttattcgcttggattacggtatggaatttgaaagcgatgattctgacaataacaagtataccagaagcgcggcgtatttgaataagtggatagaggaacaggttcttgtgtttgaagacgaaccggcgttttatatctatgagcaggtttttcagcttgatactgaagaatccccgacgcattcgctgaagggtattatctctttggttcagcttgaggagttctcaaaaaaagttattctgcctcatgaggaaactttgaaaaaggcaaagcgtgacagacttgatttaatggaagcaactaagacaaatatgagccaaatatattcgctttatatggaccctgaccaggcaatcgctgatattatttcagagtgttctgacggagctcccgatattagttttacaaccagggagaatgttattcaaaatatttggattataaaagacccggctataattaatgttatttctaaaaagtttgaaaataagcaattgtttattgccgacggtcaccatagatacgagactgctttgaattacagaaacgcccgtcatgaagctgacggaactgaaatcggcacacagtcgtatgactatactatgatgatgcttgtttccatggacgacagcggtctttttgtatttccaacacacagaatgataaaaaatgttaaaaacttctctgaacagcttacaatcagtatgctgaccgatgattttaacgcgtctaagatatacttcaccgagggcgattttgcggagataataatgactaaactacgcaacaccgttgatgaaaagaggtttgcgttctataccggcggaaattattattatctgcttgaactcaaagatgttcatataatggatgatttaataaaggataagagcaatgcttataaatatttggacgttacaatactgcataagcttatattagaaaagtattttgatatagatgacgcaagcttagccaaccaggatcaccttgtatatacaagagacgcgtctgacgcggttaactgtgtaaagaacggcgattatcaatgctcgtttttgataaatgcgacaaagatttcagaaataaaggatatttctttggctaatgagaaaatgcctcaaaaatccacctatttctggcctaaactcataacgggtatagttattaataagtttgactaatatttttaacttgataaccggtttatgtttttagaagataacagagcaggaggaatataccaatgaagataggaattatgggattcggtgttgtagggggcggcgtcggagagcttattgccactaacgccgaatcaataaaacgccgcagcggcgaggaaataacagtcgggaagatactggatttaagagattttccggacagtcagtataaatgctttactaaggactttcgggatattttaaacgaccctgaaatcggagttgtggcggaagtcatgggcggcacaaaaccggcttatgagttcacaaaacaactgcttgaggccggtaaaagcgttgtaacttcaaataaagaacttgtggcaaaacacggaaccgaacttcttaaaatagctaaggacaataacgttaactatttgtttgaagcgagcgtaggcggaggtatcccgattataagacctctttacaccagtttggccgcaaatgagcttactgatatatatggtattttgaatggtaccacaaattacattttgacccaaatgattaaagaaggggaaacctttgagaacgcactgaaaggcgctcaggaaaacgggtatgcagaaaaagacccgaccgctgatatagaagggcacgacacctgccgtaagattgccatactggcgtctttggcgtttggcaaatttgttgacagtgatgagattccgtgcgagggtatcacaaaagtaactcttgaggatgtggaatacgcggctaagttcggcgcagtaataaaattgctgggtataacttcaagggctgaaaacggcgtttatgctatggtttgcccggctattctggattcttcacatccccttgcgggaatagatgacgtattcaatggtattatggtcagaggcgagggactgggagacgtgatgttttacggccgcggcgccggagcgcttccgacagccagcgcggtgctttcagatataatagatactgtaaagcataaggataagcatatcaggttaggctggagcgaggggcaggaaggctatttgctcgacgccaaaactttgccgtcaagattttatgtgaggctttcaaagacggaggcggctccggagacgtttgctaaaaaaggatacgatgttataactttggacggcgagaaatataaagatgagtttgcggttgtaacgcctgaaatgaccggttatgaatttgacaaacttgtgtcagttgacggcgagcttggcggatataacgttttgggaaagataagattggtggctgaataaaatggttaaggtcagagttcctgcaacatcggccaacatcggccccggattcgacagcatgggtattgcgctggggctgtataattatgttaccgccgaggaaaataattcgggcagactgcagattaatattttggatgactcaaaaaaattcctgcctgaaaatgagaacaacttaatatataaatccatgaaaagagtttttgagatggtcggccataaatgcccgggtcttaaactcaccctggagaataacataatgattaccagggggcttggaagcagcagcgccggaatagtcggaggaatagttgcggctaataaactttccggagacagactgtctatgaatgagctgttaaagctggcggcggatattgagggacatcccgacaacgtgacgcctgctctgctcggcggatttaccgtgaatgtcagaaccaaatatgctatacggtatgttaagactgagcttaatccgaaagatttgtgttttgcggctctagtgccggacttttatcttcaaaccaaaaaatcaagaggggttctgcctaaatccgtgtcccatgacgacgcggtatataatgccgggcacagcgcgctgctgacagcaagcctcatgtccgggaagtatgaaaacataaggaccgcagtaggcgataaactgcatcaaaattacagaaagcggcttatccctaatatggacagcctgttcaggctttgttatgacaacggcgcgcttggcgtgtatctgagcggagccggaccgactataattgcaattataaaagccgacaatcaagcgtttaactgcaacatcagcaaggtgcttataagcaaaatgaaggattggaagcttcatcttttaaagcccgataatctcggagcgtgtataatagaaaatacctaagtaaattattttagaattttcaaaaggataactgtgtttacggcatggaattctcatttgaaaagatatataaaaacaggaggggtttttttgggacttatcgttcaaaaattcggtggtagttctgtggctgacgccgcaaaagtaatcaatgttgcagagagggttaccgagacttataaggcaggaaatcaggttattgtggtagtgtctgcacagggcgataccacggacgacttaatcacaaaggcgaatgaaataaatcctgacgcttcaaagcgtgaaatggatgtattgctttcaagcggcgaacagatttctatagctcttttggctatggcgatagaaaaaatcggatgcccggtggtatctttgaccggctggcaggcagggtttaatacaaacgccgcgtcaggaaatgcgcgtatcaacaatatagatactgagcgtatgcagtctgaacttgacagaagaaatattatcgtggttgcaggattccagggcttggataaatatgataatataacgacgctgggccgcggaggcagtgatacttccgctgttgctatagcggctgctatgcgtgcagataaatgtgagatttatactgatgtcgacggggtctatactgccgatccgcgtatctgcaaggacgcaaaaaagctggatgaaatcacatacgacgagatgcttgaacttgcaagcctcggggcgaatgtgcttcataacagaagcgttgagatggcgaagaagtataatgtaaaattggaagttaaatctagttttgagagagtgccgggcactcttgttaaggaggtagttagtgtggaaaaaatgttgattaggggagtaactcgtgataacgatgttgccagaatagcggttgtcggtcttgaaaacacaccggggattgctttcagagtattttctcagcttgctcaggagaatataaatgttgatatgatactccagtcagtaggccgtgagggaacaaaggatatagcgtttacggttacccgtgagaatgaggctaaaacgctggaagttttggaagggttaaaggatattttaaattataaagaagtcaaccacagggatgacctgtcaaaggtttctattgtcggtgccggaatggtgaacaaccccggggttgctgcaaaaatgtttgaggctctgtttgataatgacataaatattcatatgatttcaacttccgaaataaaggtttcggttctgataaagcttgaaaatgctgaaaaagcagttaaagttatacatgataaattcaatatttaaaaaaatactggaacggtttaaaccgttcctttatactttaaaggtggtttttatgaaaactgtattgattaccggagcttcaagaggaatcggcgctgaaaccgcacgggtattcgcagagcgccgcggcgaatataacgttataatcaactataataaatccgccggtgaagcaaaggctttggcggaggagacgggcggttaccctataaaagcggatataagcgtgccggaacaagttgagagcatgattgataaaatagaagataaattcgggggagttgatatacttatcaacaacgccggaatttcaaagtttaatttgttcacggatataaccgaggatgaatggtcggaggttatggaggtcaatctaaacggtccgtacagagttacgcgcggcgttgtcagacatatgataaacaatcattttggctcaataataaatatatcctctatgtggggagttgtgggcagttcgtgcgaggtggcatattcaacggccaaatccgggcttatcggcatgactaaggcgctggcaaaagagcttggcccctcgaatataagggtcaactgtatagcgccgggggttatagatacagatatgaacgcagggcttgatgaaaatactgtcagagaattgatttccgaaaccccggtgatgagaatcgggaaaccccgtgacgtgggcgagctggcttactttctgtcaggaagcggagcggagttcataacgggtcaggttatcggcgtcaacggcgggtttgtggtttaggaggaactgaaatggaatatataaaaacaattttcagtgaaagaatcttaaaggctgtaataagcaatccaaaacataaagacggcaaatataaaaagattgaaatagagctgaaaaaaatcggcggcacagagaaatatcaaatcgcctgctacacagaaaaacaggtttttcacgagaacgtagaaccggatttgataacaggcactgttgaggagataatgcggtccgatagcttcagacagctcgacgcctggggcgcggattttttctatatgctgaaggtttcaaaaaaaggcaaagaaagtctgataaaaaagcggattgcgagtaaaactgacgaagccatagccggcaacaacagaaagaaaaagtatctgctggaggaaaacacgtcaataccgccgctggttgatttaggcgtgtttactaaggacggacatatcgttagctctatgtatgataaatacaggcagataaaccgttttgttgagatagcggacaatgttgtggattctttaaaactcagcagtataaacatactggattttggctgcggaaagtcgtatctcacatttatattatattactatctgactgagattaaaaaaatgaaagtgagcataacaggtcttgatttaaaagctgatgtaatagagaagtgtaataagctggctgaaaagtatcggtatgacggactgagctttgaaataggggatataaacggatatagcgttaaaactccaccggatatggtcattactctgcacgcctgcgatacggcaacagattatgcgctatataacgcagtatcatggaatgcaaaggctataatatcggttccgtgctgtcagcatgagctgaacggacagatagagacagaaaacttttctgtgctcacagattacggtctgataaaggaacgtttttcagcgttggctaccgacgcaatacggggaaaaatattggaatggcagggttataaagtacaaatgctggagtttgtggattttgagcactcgcctaaaaatcttttaataaaagctgtaaagcgcagcacctcaaaacacgtgagggagactgcaaaaacaaaagccgaaacgctgatgaaagagtttaatttcagccccacactgtatgaattgtttcaatccaaataataatcatgtaatttatattaataataaaaaattataaaagtcaacagaaaaattaaaggtgtttttagtgaaccttgcagtgtgtgacagtgactgccttacagacgggtttacagacattgcagataaaccaaaacgaattaaaaagaatcacatccaccctacaggtggggtcacatcttccaatgttcgctgaaaaactgacttttttaatggattgaatcaatatgagctcgaaatatcttttgtcacggtagtacacaaagtcaacgggaaagttacagggcttttttcatcatgaagccatgcttcatggtgaaatgagcgggggacgagcgcccattggagccgttaggcgacctaagcgagcaagcactttttctttggtgaagcgtttctttttcttgccagaaaaagaaatggttcaaacacctattataagtaaaataataaatattatatggggtcatatacatagaaaagctatataatgaacactacgtgttcagatggtagctcacctaacgtggcgcataaatgcacaataaattacttagttgtgatgtgcaaactatgtttgccgcgtaaggcgcgcagtcacggaaaaatatattagtaaaaaagattataatatacttttttaagaatgttcacgaggtgcgtgattattgactctaacatttttatccgctttattgttgtaaccgtcttataagacgtgtccgccgacatagacaaaaagaccctcctatgagcattcataggagggtcttttattaatcaattatcattgtttcagcgtcttcatcaccgtagtcatagtcgtcgccggaaacttcaggcgatgatttgtcaggtgaagccgttccgggattcgaagtggtgggagccgaactgtttgaagttgtaggagccgcactgcttgaagtagcagcgctggccgacgctgaagcggacggctccggctgaacataatctacttcttcaaatttaacaaactgtttcgggtcaaggaagttgtcgtcaagtttgatttcaaagtgcaggtgcggctggtcgttcacttcagacactgctgaacttccgactttgcccaaaacatcgcccatctttattgccgcgccaataggctcagacgttgcgtctttaagattgcagtatacactgtcgattccgctgtcgtcatggtgcagaatcacggttgtgccgaaaagactgtcctcgtataccttttttagaaccccgtcctttatggctgttacaggcgtatccttgttggcggctatatcaactccggcgtgggttctccagtccttcatcgtgtcagaatagagcagttcagagtcagaaaaatcttttataatttttccggacacaggcggctgaaccagttctgttgcttcggaatcagatgttgtttcggcgtcaggcttttcggttgccttttgagtttgagagttgatttcgtttctgctcagcggttcgcttgcgtcatatggtgttgtctgagcgtttgcgggaacgctgtcatagttgggcgccgcagtgctgtaggctgagccggttttggtttcatttggtttttttgcagtggtgtgcggaagcagtgagttcagaaccgcataaattccgattgccgtaatccccagtaaaaggattatgtaaaatccttttcttcttgatgaaacggcctcttccggctgctttttctgctcatcactgggcggatcgactattattctacggtcataattgtcatttctccctttgtttctgtcatctctgtctttcggatttttactcattttatcacctcagataaaagtctttcccaaaacatgaaaaaaatacatgtgtttataaaattttaggagaatttttataaagtcttttatctaataatgaaagataagatatgttaatctactgaacaatttttaaattcataaagggtcgaacctgcaagatgtatgtaagccataatacactttcctttaatgtggaaagtgaaaaccagacaaaaaattaaagctgtttaaattaaaaatatataaaaatgtggtttgcaagcctcggaaaagtctgatattaagggagttatagcaaatttaactaagtatgtacacgcttcgcgtgatatgtcagttcaccgcctattggggtgtgcaagcatatatattacatctaagtaatttattatatggcaaccaagttaattattggcgtttatatatataccctttaaacaaaagtgccgccgcagacattgcaggtaatggcaaaacaagtaactttgtattacacacaccttgcaggtgtggtcacattcataactctaccgctgtttactaaaaacacccttaaattttctattgaattttcaaagcggacgagtgctgcgttatagttttgcaagtttaataaaaaatatattatatttctatcaggcgcatacgggtgtacttaacagtttcagaagggcgcaatcctaggcttttattgatatttttgcggccaatatcaaataaaatttgtgtgtttatttttttatatgagtcaaaattttaaaaattgcgcccttctgaaactgttagcttataattgtgttaataatgtgccgtctgaacgaataattatagtaccgagctggtcggtgcgtaagattaccgaacctatactttcaagattttgaagcactgtgctgtccgggtgtccgtatttattatttttaccgcaggatattacggcatatttaggagagactttttccaaaaacgccgctgtggatgaggtgtcggagccatggtggccgacctttaacacatccgcctgaacgtcttcatcctgcagttttacttccgtctctttttctgcgtctcccatgaacaggaaagaggtatttttatagtccatttttattacagcggaataattgtttaagttcttatatgcttctgagtcaggagccaagataccgatttttaagttttcggtgtttaaaatctctgtccccgattcggctttttccactgaaatattcatatccagtatagtttggagcaggttttcaaacgtttttgtattggttgatactttcggcatatacatatgaatgatgttcaggtttttaatcacataggacattcctccgatatggtcggcatgagggtgggtagcaacgaggtagtttatagtatcatagccgaggttttttatatatgcggtgatttcgggaccgctgcccgaatctccggcgtcgataagcattgtttcattgttcggcagttcgataaactcacaatcgccctgtcccacattgatgaagtgcgccgtcagttgcccggcgcagggcttttccgccatttgtgccgaatctgtttgtgacggctgttccgctgactgcgttatttctgttgataatatgtatggtgatgtcagtgctgatgtttctgtgactgttgccgcagggttttgggttaagaatatggctgctgaacatgcggtgagcagcagtagtattgttattataattatgtgaagttttttcactttaaatcccttccaagctttttttatttattatgtttttttatatgattgtataatttaataaataaaaattttagcaaactttgtcgaaaagaggaatttttctcaaaactcaatccataagatgtagttatcatatcatggatggttataaaaatcaagtataagttttataattaatatgcaaacttgaattagaggtgagcatgtgaaaattaaaccgtacgattatgctccagttggggaaagagtaaaaaatgctagagttatgagagaacttacgcaagaacaagtggcaaattatattggcgttaatagtaaacatcttagcagtgttgaacgaggagagcgtgggttatctatttcttcgctaatggatttatgtaaatttttagatatagatgcggactacattttatttggcactattacccgtgacaataataacccgtttaataaattgttattgcagatgactcctgaacaaagccagtatgcagaagaattaataaaagtgtatgcaaaatcatgcggtattttcataaaataaaaactaatttttatatgtgtatggaggtgagattgtgagaataaaagaatatgattatgggccaataggtacaagattacgtaatgcacgtacaatgaaaaaatgtactcaagaatatgtagcgaataagttgggagtgagcagtcagcatattagtgaaatcgaaagaggtttaagcggattatcaattccatcattaatggaaatatgtaaaatattagatatagatgcagattatattttattcggtacagtcacaagagataatcacaatccactaaatgaaatattattaaaaatgtcacctgaacaaagtagtcatgcggaagaaataataaaagcatatgctaaatcatttggtataataagttaaaagatacgtttgtaatttatacaacgtatcttttttatttagtatgttgataaaaagcaggttttttagtgaacatcggtaggcttgcgatagcaagcgcgttaggtgagccaacatctgaacacgtagtgttcaatatataaaaaatatttatcaaaattaactttgtatatgaccccatataaaaaattttattattacataatagggtgtttgaaccatttctttttctcgcaagaaaaagaaacgcttcaccaaagaaaaagtgctgctcgcttaggtcgcctgcggctccaaagggcgctcgcccccgctaatttcttttgcgctttacgcacaaaagaaaaagccttgtttttttcccgttgactttgtgaactaccgtgaatgaacgcaggcgatataaaaatactttaacgtgcaaatttatttgattttatgtattagaaaataagaataaaataatatgactatggaccaataggtacaaggttgcgtaatgcacgtacaatgaaaaaatgtactcaagaatatgtagcgaataagttaggcgtgagcagtcagcatattagtgaaatcgaaagaggtttaagcggattatcaattccatcattaatggaaatatgtaggatattagatatagatgcagattatattttattcggtacagtcacaagagataatcacaatccactaaatgaaatattattaaaaatgtcacctgagcaaagtagtcatgcggaagaaataataaaagcatatgcgaaatcatttggaataataagttaaaagatacgttatgtaatttatacaacgtatcttttttatttagtatgttgataaaaagcaggttttttagtgaacatcggtaggcttgcgatagcaagcgcgttaggtgagccaacatctgaacacgtagtgttcaatatataaagaaaataattattattttacttaactaaaaaaaccatttatctactatgtatatgaccccatataaaaaaatttattattacataatagggtgtttgaaccatttctttttctcgcaagaaaaagaaacgcttcagcaaagaaaaagtgctgctcgcttaggtcgcctaacggctccaaggggcgctcgcccccgctaatttcttttgcgctctgcgcacaaaagaaaaagccttgtaactttcccgttgactttgtgaactaccgtgaatgaagattttccgagttagtattatgatagatttgagcaaaaagtaggtactaattaaaacgaatataaaaaagtatagaataattataaaatttatcaatagattagaaaataaataattagtttatatattgaacactgcgtgttcagatgttggctcacctaacgcggcggcatagccgcccttccgatgttcgctgaaccccagcgtttttgacgaattaaataaataggaaactcgaaatatcttttttcacggtagttcacaaagtcaacgggaagttacagggcttttttcatcatgaagccatgcttcatgatgaaatgagcgtagtgcgagcgccccttggagccgcaggcgacctaagcgagcaagcactttttctttggtgaagcgtttctttttcttgcgagaaaaagaaatggttcaaacaccctattatgtaataataaaattttttatatggggtcatatataaagtatataatttaaaataatatataataatataatttaaccctctttcgtattgaaaatattatttaaatatgatataatatattaaattcaggggggtatttaatgagtaaaaatattggatttgataacagggatcgttttattgaattaggtattacaatttccgcaataaggaaaatgaaaggattatctcaagaagaattagcaataagagcaaatattagccgctctcatttaagttctatagaagctccaaatatcgtgaggctgttctcattggaagttttatataatatagcagatgcgttggacgttagtgccggtgatttgttgaatataaaattcccatttagtgatgtaaaaaaagaatctaaatgattgaaacaaatactcttattatattttaagaatgaaaccatttaaaccattgaaactaaaccttgtatattgttttttataaaaaattatgttttttcaaacgtcggtaggtgtgaccacacctgcgaaagtgggcgtgagccttaataactctttatccgtaacccttcaacgtcaataatttgaatactcaaacgcggcaatgccgccgctttaggtgagccaacatttgaacacgcagcgttcaatatatcgttaacaattataaatataaaaataaaatattcttgacaaataaagaaaaagagaatataataaaagcgatttaaatgaagctctcttcgacaggctcagaggcagctctgaacccgcaagcaagcttgctgattaaagataaaaggtaaccgttaaacggttgtcacaaaaacagattttaaattatataactgtcctgtgccagaggacagttatattgcttttatgacaatatctagacaatatactgccgtattatataaatcaatatccgttctgcattctctctatcaatatccgctctatctcagcataatcactcttattgccgtcgctgtaattattaaggccgggcgatttaactactcctctgtcagctttctgcccctcatattccgcccatttctttatcgccagtaaataatttttatacttgtatcccttaagctcaattccctctgacaaagtttctatacggtcagaccaatcgtttggatagaattgtttaagctctgaaaattcctcatcagataaaaaaacatttttgtattttccataaacatttttatctgaattatcttttcttttattattttcttttaaaatagttttgtcttgttttgttttgtcttgtttatataatggtctactcctctgattactaccttgattactatcttgcctgctatctgcaataccgcttggacacttttcagcaatgttattacttattgatttaaaatcttcgcagaatgaattaatcgtatatcttgcagccttccctttaaaagccttaaaatctataagccccaattgtttaagaacctcacggtttttgtatatccccgattttgacaacccggtgtggagctctaaagtgataaccggaaccgtaaaccattttttccagccgcttttattgtctatatgcatgagagcgtaccaaagcgcaatctgtcccgaggaaagccgctctctcaacagcaaatcattaaacccttttatttcggttatataattcatatgtatagctccttttcattttgttaagagccattatacaactaaatttgtgccataacgtgccgtcatgattccgtatgagaactgagaattttagacgcaaaaaaagccggaatattccggcttacgctgattggtggagatgaggagaatcgaactcctgaccccctgcttgcaaggcaggtgctctcccagctgagctacacccccatatttcagcaacgacagatattataacacaaaattttcaacttgtaaagaccttttttaaacttttttatattacgtagctgctggtatctaacagtctttgctcatccaccaaatcctgaagcgttgtgttgtcgacaacactttttatagcgtcatcaagttttttccaaaccataagggtcgcgcacgcgctttgcctctgacatgtattaatatcaccgtctaagcaggacacaggagccaggctgccctcggtgagacgcaggatttccccgactgtatactccggcggacggcgggttagtctgtatccgccgtttgacccacgctcagatttaacgaatccggcacggttcaaaattgtcattatttgctcaaggtatttgcgtgaaatatcttgacgctcagctatttcttttgtggaactcagtccgttttcaccgtttatcgccaaatctatcattagtctcaaagcatatctgccctttgtagatattttcataacccagcactcccaagaatattattatattcttatattatatacgtttaccgggaaaaatcaagtctgtctactcatgattttcagacataagttttttaaaataatttatagcttcacatatcccttttatatttcctttatcattgagcttctcaaaattgaatctgcatatattgcaaatcttaatattcctgccattatatttagtttcagtcagctgttcagcttctcttccgcataaaatacatttcttcataactttcacctggctttgtcaaactaacttttatttaattttgtccactattacaataccatagtatttttaattagtcaagcgacaattatattatagtattataataattgacagggcggtgaatttatgttgagcgaaaaaataagagaattgcgtaagtcacacagaataagtcaggtggagttggctcaagtactctgtgttacaaagcaaagcgtttcaaattgggaaaatgacaacatacagccgtcaattgatatgctgataaagatagccaagtacttttctgtctctacggattacctgttagaccttgataataagctgacaattgacgtttccggacttactcaggaacaaattgcgcatataaaacttataatttcagatataaaaagccggaaaaattaaaataattctaaaaaaagtcttgatttttatattttattatggtatactaatatacgtgtcaaattaagatttgccggtgtggtggaattggcagacgcgctggactcaaaatcctgtggtagtgataccgtatcggttcgaccccgatcaccggcaccatgtcggagcaagcaaagcttgctccgatttttgtttgcgcaaaaatcaattgtctgcgcggcttacacgcagatttcatctgcattgagtatttaaattattgccattaactataatgttattattatgaatgtttaaataaaaggaaatggttcaaatatttattataagtaaaataatacatattatatggggtcatatacaaagtaaagttatataatgaacactgcgtgttcagatgttggctcacctaacgcggcaaactacgtttgcccttccgatgttcgccgaagagcaactattttgatgagttaaataaaataggaactcggaatatctattttcacggcagtacacaaagtcaacgggaaagtaacaaggctttttcatcttgaagcgcagattcaagatgaaattagcggggtgcgtatacatcacaattaagtaatttattatatgacaactgagttaattattggcatctatagtttatatcacattatttagtttatataatatacacttttatttaaaagtgtagccacaattgacattgcaggtttatcaaaacaagtcaatttggtttacacgcacctttcaggtgcggtcacaagcgccccttggagccgcaggcgacctaagcgagcagtactttttctttttttgagtatacatattattgacattgtaggttatggcaaaacaagtagctttatattacacacaccttgcaggtgtggtcacaggtgaagcgtttctttttctagcaagaaaaagaaatggttcaaacacctattataagtaaaataatatattatatggggtcatatacaaagtaaagttatataatgaacactacgtgttcagatgataactcacctaacgcggcggcattgccgccctaccgatgttcgtcgaagaccagcttttttgatgagttaaataaaataggaactcggaatatctattttcacggaagtatacaaagtcaacgggaaagtaacaaggctttttcatcttgaagcgtagattcaagatgaaattagcgggggcgtatacatcacaactaagtaatttattgacattgcaggtttatcaaaacaagtcaatttggtttacacgcacctttcaggtgcggtcacaagcgccccttggagccgtaggcgacctaagcgagcaagcactttttcttttatttgagtattcatattattgacattgtaggatattcaaaacaagtaactttgtattacacacaccttgcaggtgtggtcacaggtgaagcgtttctttttcttgccagaaaaagaaatggttcaaacacctattataagtaaaataataaatattatatggggtcatatacaaagtaaagttatataatgaacactacgtgttcagatgataactcacctaacgcggcggcattgccgccctaccgatgttcgtcgaagaccagcttttttgatgagttaaacaaaataggaactcggaatatctatttttacgataatttattaagtcaacgggaaagttacatggcttttctcatcaaaaggcatagctttatggtgaaatgagcggagtacgtatacatcacaactaggttaattattggcgtttatagtttatattgcgttatatggtttatatgacatatacttttaaacaaaagtgtagccgcaattgacgttgaaggctatagcaaaacaagtaactttgataacacgcgcctttcagctgcggtcacagtcacacctgccgatgttcactagaaataccatttttttatataatttatttatgatatacttgacataatacttttttagtttgcagactttttattgcataaaaatagagcatcagactatgatgctctataaaatttttctctcgatggtcattaattgtctgaccttctatttttgttaactgttacaaataattgcaaacagtccataaacattaaacagtatcaattctttttagcagtcatccttgagcgggaagttataagcgtcaagatttatctgatggcatattattaaaattccctcaataaatccccaaatacttcctacgccgcaggtaatcaaagttaccactatctgtacaaccgcacgggtagtaaatcccaaataaaaattgtgtactccgataccgccgaggaatattcccaaaagacccgctaacagcctcgatttcggaacatagttcataggcggctggtatggcggctggcgatagttctgaccaccgtaattattctgacctgcgttgttctgagcgtctccgttattgctttgtgcactgccgtttattggcgtgccgcagttggtgcaaaaatttgaattgtcacttacttctgttttgcagttaggacaaacttttgcggactgaccgttatctgcagctccgcatactgggcaaacgtttgcgccgtcttcaaattcctgaccgcagtttttacattttttcatgttttacagtcccttctataagtttataaaatttctaattattccccatgttataaataccgccgccaaagtaacaagcgcggcggcagcgtattttgaaaaattctttcctgttatatatatgtaaggcagatatatcaatatgtataaaagagtgaatacttcaggataaaacattaagttgaattttacaggggcaagaaaatctccgtttaacagcgccagcataccatttgtattgccgcagccggggcacttgaacccggtcaaatcccgaaacagacaccgaaggccaagctttccgttaagcaaaagatatccggcggcaatgcccaaaacaatcagaactaaatacaataaaaccactctttttatcctgacagcctttcccataaaatccacctcttacagtaagtacattatacagcatatgcaaagttattgcaatgcttttttgaaataataaaatttttgtcaaacaaagaaaattatacttgtgcggtctttataataatgatataattaaaatatagactactttgtgaggtatagtgatgtttaaaggcaaattgatatacagaacggtcgctttgtttatggctgttgttatactgcttattgccgcattcggcgttgcggcagttttttgtgttacccggaattatgaaaattcttttattgctcaggcggactctgcaatacagtcaggactgcctgattctcttcaaactattctgaactcgtcgaaaagagagtttgtaaagcaatacgagattaaaaaactgctggattcatactcttctgttttaaagctggacgaaaacaggaaatgttatattctatccggcgcaggaggagaagtgattgctccgtcagcgcttatgcaggaaaaagttcaaaaaactccaaacctgaccaatgcgcttgataagcacacaaagggcagcaacagtaatttctcttcggatgttcttgactatgcgtactacattaagccggtgactgatacggccgacggttatattatatatatcagggataataaaaacgtattgcgggatattataaaccaactgctgtgggtcttgttatggacgcttcttgcaggaatagctttggcagttttgacggctgtgtatgtttcccgttctgtgaccgtgcctctgcggaagctttccaggcgcgccgacagctttgcaagaggaatatatgaccttcctgccgaaacagggcgcaacgatgaaataggtgcgctttctaaggcgtttaaccatatgggcagtgtaatgagcagaacaatcagccagattggggctgaaaagcataaagtcgacgttattttggaacatattaccaacggtataatggcgtttgacactgaccaaaaactcatacatatcaatcctgccgcggcggatatgcttaatattgattctgattcagtttcagaatttgacccgttttttgaaaaactgaacgccggagtttgtatggcggagtttatgtatttggataaatacgctaccgaaataagagatataacatatgacggtaaacacatccgcatatactttgttccgtttaaaatggacaacgacaagaccgccggaatcgtttgcgtgtttgaagactttaccgagcagttcaaccttgaagttgcgcggagggagtttgttgccgaggtatctcatgagctgaaaacacctttatttataattaaaacccataccgaaacacttttgaacggctacatggatgataaaaaaatggcgaagaaatttctgtccacaatagaaaccgaagcggataaaatgactgctttagttcgaaatcttttggatttgtcaaaatttgacgtacagaaatttgaaatgaaaaaacaggtattttcaatcgaccaaatgctgcgggggatagtaaacaggtttgcgcttgaagcggagatagaggatatagaactgaaatatctgccggcaaatgagctgccgcagatgtacgcagacccggaacagatagagagggctatagtaaatatagtatcaaattctattaaatacggtgaaaagggcgggtatgtgaatgtggccgccggaagtatgtataatgaagtatatataaaggttgaggacaacggtcacggtataccaaaagcggacttagagcatgtgtttgacagatttttcagagttgacagagcgagaacaagagaaaagggcggcacgggccttggtctttccatagctaaagaaataattgaaagccacggcggttctatagtcatagagagtgagtatggcaaattcacaagggtcacaatcaatctgccaaccgccaatgtgaattgagttgttttgcgttttggtttatggggttatatatgttttataaattatagaattataaagtaaaatttttatatgaccccatatattttataaatcaaaacaacattgttttatacttatacatatatataatttaaccaaatatttataaataaatttgataaaattagaataatttacatattgtaaaattttatgatctgctgtataatatcatatgttgttcgctgaaaagcgaaggatatgcacctttagctcagctggctagagcacctgactcttaatcagggtgtccggggttcgaatccccgaaggtgtaccaaatttttaagagaatgggacaagtcccccgatattgcggggcttgtcccatttttatttttttgttaaaatgttttttataacttgtcagacaccttgtgtattttggagttttccacaaaatcaaggcgtctgatttattctaaattaaacaactgttttaataaattattcctctgtataaagcggttgcatattgccgtcccaaacaaagacctttaccaaatctccggagcttacaggtactttaacatcgcttcctgtctgcatgtctgtaaggcattcgtccctgtatactgcggtgtatattacgctgttgcttgtgtcaacgccgtcgggaataactatctttgataaaacagagtcattttcaataacagaattattttttatttcattcccgttttcatcatatatttttagctgagtatttttttccgcttctgataatgtcacgttaaatccgaattctgccgcatactttatcaaggttgatgaactgcatgaatcctgagcaacacccaaataaaccgtttcaggcagtgttgtgtcttcaataatatacggctgtcttatattatctgtgaagtcagttccgttttccgagacggacattgttagtcgctgtccctttcttgtcattctcagatatttcggcatatcgtatgttattgagtcaacattctctaccggggtgccctcagcgtcaaacatatatgagtttgtaaccgccgttccttttacgggtctttcaaaaacccttatgttttcgccatacttcagccagctgtccgcaagaagatacatttcagaactgctgtccaggctgctcctcaccataagtcccgacttaacattgttttcaaacttaggcacattcttggtttccagtattatatcaaagtcccctgtaaactcacggtacataaaaccgaacgaatccatcttgccggcgctgtttccgccgactgaaccgctcgcaataatgctgaacccgtcctcgttttgagtgtatccgcctttatacggcacactgccaatatctgcatatagccactcgccgtctgacagcccgcggatatatattattgatgtgtccgacgacgtgctttcacctttgtcgttataggcgcggcttgttatataatgagtgccgggagatagattaatcgttatgtttattgcctctgttccctctgacatctcaattaattgttcaccgtcgtaaacttcaattttggttatttttgtaccttcggcaggttcggatacagcgccgtattctatatttcttttgtctgttgaaatatatggagtgttgtcataaatatttgcatatccggttacggtttgcgttccgtccgatacttttgatattgttattttgggattggtcggcgttattgaatttgtccagccggattcggtatacgacagtttttcaatctcatcaaacacataagcttcaagccaggtatatcctttgtataaaccctcgctgattatatcagtttcatccgcgtcacccatgttgtttgcttctttccatggttcggaaattttaaatattttgctttcgccggacatatcaacgtatccgccgacctcatacgccttgttgattaaacgcccggtctgatttttcatatcctcaaccacacgtgcgtctatgctgtctcgaaccggcaagactgccccggcgctttttacagctttgtcataagcctcctcggcgctgacttcatccactttatactctcccatgtcgaacggttcattttccctaaccgcgttagccatgttatgaatgagcgcctcgtccgcccagttgtcatttaggccgttattgttattttctgattcatagccgtaaacgtagttaccgtttatataatagtgcgaacctgttcctgagacgtcaaatatcttatactttgcctttgtgctcggaccaaacttgtagtatgagttcaccatattgacttttgtataaaagttttcagcagtcgattcgccgccgtaacttgaattgccgccccaattatatattacgttattttttagctcagtatagcttacattgctggcaagtcttgggtttctgctgtcatgatgggctataatattattatagtagcttgtgttggttcctccccatatcgctccgtaaccgtgtgcgcctttataatggtttgacagacgcaggctttctgatatgagacagtttgaaattgtatagttaccggtgtcagcgccgtctggattaaggccgccgtacagggacataagttcatcaatcccccagctgacgctgcaatggtctaagacaatatcatttatgtgcgcgccgcccaaacagtcccattcaccttcaacactgtctccggggcgaactctcaaatatcttactatgacgttatctgctgcaatcagaacgtcggttccggcaatggttattccctgccccggcgcagtctgtcccagaatcgttatatttgagttgccgattttcaaacgttcggtcaagttaattgttccgcagacatcaaaaacgacaattctgccgggacgcgatacggcgtcacgcagcgttcccgggccgtcgtttgcaagacttgtaacgtgatagacgcttatgtttttatttcccctggcgccggtggtcttttttccgccgccttgaattcccggaaccgcgtcaggagatactgtatcatactttagcccggcgccgtaaaagataagcccatattttccggtgacatatatgtatacagggattccttttttaacctgcataggctcagtggttatcattgttttgccgtcaagggtgaacgagcctaacactataccgtcctgcttcacctcaaagcttctgagacctgagccttccgccgccacgttatacatatcaacaaacagcatactgtcggtttcaggtataatactcacggcgcagtcgggattttcaacatttttacacgggctcagaaccgcccggttgacgtaggttctgccttcaaattttttgacgctgggattcacggtaacgctgccgccgcttgcgtgaacatacaaattattaggcagaataatatcttcagtgattttaccttctccgacatcgctgaaatcatagaggtcagttatcgttgttatattttccgcgtttacagatacggatattaacagtaaaataactaacactgtaatcggaaatatctttctcataataaatcctcccagtcaagcaaaattaataattttattataacataatttttgaaatttgtatataagtaataaaattacaattttgcgacctgttatgacgtaaaaaagtaatttgctaaaagcatatttacataatcgttttataatgtcttccttgcttatatagatatataattaaaaattgcaggcgaaaatataacgtgggttgtctgcacaatagattagtaaaatccatatttaggaatactgagataggaaaatagtctgctatgataattatgcaatatttttttagtttataatataactgtcatatgctctaggcagtattttattaagctaggcataccggatatcaattattgtgataggtattgaaaataatactatattatgatataatgcaaaaattgtgatataaaattttgtttggaggaatagaaatgggattatatagcattatccttgcggccggtgagggaaagagaatgaaatcaaatattgcgaaacctcttcagcaggcggcaggaaaagcccttgtggaatgggttttggatactgcggaagaaaccggaagcgatgaaaatatcgtcgttatcggtcataaggccgaagatgttaaagcatatcttggggacagggcgaagtatgcctatcagtatgaacagctgggaacaggacacgccgttatgcagggtatagaaagcataaaggacgtagacggcactgttatggttctatatggggattcgcctctgatagaggctgagactttaaagagggtgcgtgaagaccacagcaaaaagatgagggccgctactgtaattactgcgatagccgacgagccgtacggatatggaagaatagtcagagaaaacggtgaaatcgtcagaatcgttgagcagaaagacgcttctgaggatgagcagaagataactgaggttaactcgggtatgtatttctttgatattcaaaaactaaaagaatccttgtctaaaattactaatgataattcccagggagaatactatataaccgacgtaattgaaataatgctgagcgagggcgaaaaggtcggagcgtatgtcaccgatcttgaacagactatgggagtaaacgataaactccagctgtcacaggtcggaaagattttaaaccgccgcaaagttgaagctttaatgcttgccggtgttacaattatcgaccctgataaagttcaggttacaacaaatgttaaggtaggaagagataccgttttgtatcccggaacagttcttgagggagacactgtaatcggtgaaaactgtgttatcggctccaacacatctttgaataactgcaaggttgggaataatactaagatattggagactgtgggtatcgacagtgaaataggctctgatacaaatgtcggaccttttgcatatctgagacccggaaccaaagttggttctgaagttaagataggcgactttgtggaggttaagaattctacaatagatgatggaaccaaggtggctcatctgacttatattggagacgccgacgtaggcaagagagttaacttcgggtgcggaaccgttgtcgtaaattatgacggcgtgaataagcaccgtacaattattgaagacgactgctttatcggctgtaacaccaacctggtgtctcctgttgtagtaaggcacggcgcatatactgctgcagggtcaacgataacagacgaggtgccgcctgaatctttggctatagcccgttctaagcaggttgttaaggaacagtggacggcaaaaagaaaagacagcaagaaaaaataataaaatttacttgaggtaaatataatgtatatgatagtgggattgggaaatccgggcagaaaatatattaataccagacacaatatcggttttgatgttgttgacgcgttctgtgccaagaacaatataaagtttaagtcaagcaagtttagggctgaggttggaacgggtatagtatgcggcgaaaaggtgattgcggttaaacctacaacttttatgaatctgagcggcgaggccgttgcacctattgccgattattatgatatacctgctgaaaatattattgtcatttcagatgacaaaactatgagtttaggaaaactgagagtgagaccaagcggcagcgccggagggcataatgggctgaaaagtattatactcaatcttaactcagaccagttccctagggtaaaactggggataggcggaaatgatatggatgagcatgaggatatatgcagctttgttttaggaagattttctaaggcggagactgaaatcctgactgacacagcggtaagagctgtgaaagcggttgaggagataatcaggacagatgccaggacggctatgcaaatgtataacggataaggattgtatgtgattggctatgaaaacaaacggtttttatgaagttatggaagaccttgccgactttgaggagctggcaggggctttacaaaaaaatattacgcctataaacgtagcgggtgtgtcggactctgtgagggcacacctggctttttgtgtgtccgaaaaatttcaggctccgattttattggttgccgaaaacgaggctgccgcaatggaaatagccgacgacctcagatttttctcaggtgcggaggttctgtattacggaaactccgatatacttttttacgatgtagatgtaaagagccatgagatacagaagcaaagacttgaggtgctcgactatttgttcagaaacaaaggccggcgaacctatgttgtgaccacgtattcggctttgctcagtgtgactataccgtttaagaaatatcaggaaaacgttataacattaaaagttggggatgacattgagttagaaacgcttattggcaagtttgaaagtttaggatataagcgtgaggaattggttgagggagccggtcagttcagcgtccgcggcggaatacttgattattttccgtattacagtcagtatccgctgagaattgaattttttgacacagaggttgactcgataagaacctttgacaaggatagccaaagaacgattgacagatgtgatgaggccaggataactccggcaggcgagctggtgccggatgataaagaacgtgctaaattagtaaaaaagctgaacagcttgcttagcgatactgagaagcctgtatccgaaaaatcggcttcggtgttaaacagggatattgaaagacttaagcaggggattagattcccttcaatagaaaagtatattccatatatatatcgtgaaaagcccacaattttggattatttggcagatgatacaattattttttggtgtgacggccgcagaataagcgaggcgtatgaaagcgagatggtaaggtttgtggaagacataactgagatgactgaaaggggaataatccccaaggcggatacggaatactttttgccgctgaagaaggcggtaaaacggctgacggcgcatagatttgttggggtcagcggtatttcaaattattcagctgaatatagggcaaagagaacctatgctgttggctccaagtctttggcaggttttcagggtaagcttgaatttttatatgagtccctcagattttataagtccagccaataccgtacggttgtgctgggcggttcggagataagggctaagaacctgctgaaccagctggaaaatgagggttttaactgtgcgtacacagacgttctgacagagcttcctccgcccggaggaatagttataacccacggttctatctcgcatggatttgaatttccttccacgcagacagtggtgatttctgataaagagatattcgggcatgaaaagaaaaaaagaaagcgctacggcaaggttaaaggcgaaaagattgacaactttaccgacctgaatatgggtgactatgttgttcaccgaaattatggtatcggtcagtatataggcattgagcagctgaatgttgacggcgtcagaaaagattatctcaaaataagattcaagggagacgactttttgtatgtgccgacagaccagctggatatggtctacaagcacatcgccaaagacggagcaagaataaaaatgaacaagctgggcggcggagaatggagccgtaccaaacagagggtaaaagctgccgctgccgatatggctaaggaacttatagacctctatgctaagcgtgcgaatactccgggaatatcattccctaaggatgatgagtggcagagcgattttgaagcaaagttcccgtttgaggaaactgacgaccagctccgaagcatacaagagatgaaagaggatatggaaaagccgtatcctatggacagactgctgtgcggagacgttggatacggaaagaccgaggttgcgctcagaggtgcgtttaaggcggtcatggcagggtatcaggtggcgtatctcgtgccgacaacaattttggccacacagcattttaacacgtttaagcagagaatgaaggactatccgataaacgttgcaatgctgtcgcgtttttgcaccgcggcggaagaaaagcgtattgtaaaaggtttggcaacgggtgaaatagacgttgttataggaacccataaactgctgggaaagcatatcaaatataataagctgggacttttggtgattgacgaggaacagcgctttggggttgcccataaggaaaaaataaaagagataagaaaagaagtggatgtgctgacgctgtccgcaacgccgataccgagaactcttcatatgtcgctgaccggaataagggatatgagcataataaacgaacctccggcggagcggtttccgatatcgacctatgttcttgagtatgacgaggacgtaatcagggaagctataaataaggaattgggccgcggcggtcaggtgtattatctttataatagaatagacggcatatttaaagtcgccaacagaatagcggagctggtgccgtctgcaagaatagccgtggctcacggcagaatgcacgagaacgagctggagcaaattatgatggacgtgtcagacggaactattgacgtcctggtctgcacaacgataattgaaacagggcttgatataccaaatgtaaacacaataattcttgaaaacgctgaccgcttaggcttggcgcagctgtatcagctgaggggcagggtcggacgttcaaacaggctggcatacgcatatctgacctacaggcggaataagagtttaactcccgaggctgaaaaacggctgctggcgataaaggagtttactgagttcgggagcggttttaagatagcaatgagagatttggaaataaggggcaccggaaatcttataggcgcccagcagcacgggcatatggaagctgtgggttatgagatgtactgcaggctgcttgaagaggcgacggctgagattaaggggatagagacgaaaaatgagaccgagacacagatagatttacctgtatcagcatatatttcagataagtatataaagaatcacagtcaaaggatagcagcatacaagcggatagccgcgataaaaaatcaggatgagctgtatgacgcgtatgatgaaatagaagacagatacggaactgttccgccggaggttgaaaaccttatggaggtggccctgattaaggcgtacgcttcaagttataatataaccgaagttataggaaactcagagaggataacggtaaaatttgaccctgaaaatatacccgatatgaaaccgtgtttggaactgatagacaaatatcccggaaaaatatcgatattgacgcccaataatcctaaattggcaataaaacttgttcctctgtcctctgacaaaggcgggaagaactatttggctcagataaaagaaatgatgggttttttatcagaacaaagcaaggcaaatttgaataaattgtaaacatttgaataagttttaacaacaatagtggaaaattaacttgctttgatgtataatagaaaaatattttgggattgtgtagttatgcaggtcaatattttgggactgtgtaagtattcgggctgtcccgggttttatgagatttaaaattatttaaacataacataaaaggagaaaaaaagatggctaatgacaaaaaggacattttgaacgatgaaaaagttcaaaagatgaaagatgacgtaagctctaaaatagctgacgccgcgtctgaaatcaaggaagaaatttctgaggctgatcaaaaggcaaaagaagttataggcgataaacttaatgacgccggagaagtgatttcagaagccggagataagcttgaagactctattacagagataaaagcagacgcgctggaaagcgttgataacattaaagaagttattgaagagaagaaaaaaggcgtcaatatttctgtcggcgctttggttggaatcatagttggatgtgttgcggttgcagcgctgatagtatttctgattatgaactttacggccgcacagccaaagtatggcaaggctgagggcaagacagttgcaacggttaacggtgaaaaaatcacagataaagatttaggttattatatctatgctgaagctatgactcagtactatgatattgaaggcgaaagcgcagacggcgacctcagcagttttgactgggatcaggaaatcgacggcaaaaaactttctgatactataaaagaaaatgcaatgaaaaatgctgttgccgatatggttacaggacagcaaggcgaaaagctgcttacagacgataatgcttggacagagaagaacgaccagcagattcagtctacagtagacagctatgttcagcagttcggcgaggacggattcagcctgagagcaagaagcatgggtatatcttctgcaaatgaatatgctagaatgtatacaactgttatgaaggcgcagaatgttcaggcggcaatggaagaagatatttcaaagtttactccggaaggcgttgaccttcagaattatacacaggatgacagagcgtctgttaaacacattttgattgagacaactgaccctgcagctgcagatccggccgcaacacctgacccaacagcagtcgacgacgctacaggattagctacagctcagaatgttgcgcagcaggctaaatcgggcggcgactttgaccagttaatgactcagtataatactgatacaagcgaaacatcagccggatataccttcaaaaagggcgaaatggttgaagaatttgaaactgcagcattcgctttgaagcttaacgagatttctgaaccggttaagaccgattatggttaccacgtaatcatgagaatccctggattatatgagatacagggttactgggttgaacaggctaaagtaagcgaaaacaaggggaaccttgataaggtttcagttaaggcaattttggatgatgttcaggcagcaacagaggaacttgaaaacgagcaggctgctgcaagcgccgcttcaggcgccggaacttctacatcaggcggaaactccgcagcagatggaaactctgcagcaggcggagctgccgctggggaataatccaaatataaattttggttatataagattgcaccgcttaggcagtgcaatctttttatatatttgtaataataaaggttattttttataaacttatattatctgaattaagataacaaacaaatcatataagttaaggggtaggtttatgcctaagttatctgagcttgaaataaaagaaataaaaaatattaagtatttgatagttttggggtgccgcttgtttggcgtaactccaagccgatgcttatatgaacgtctctcagccgcgctgaaactggttaaagtaaaccgggatattataatagtctgcagcggagggcagggagataacgaagacacaaccgaagcccgggctatgaaagatttttttgtcagtaacggtgtagaggaaagtagaattatccttgaaccggattcacacagcacttatgaaaactttgaattttcaaaagaaaaaatattaaagaccggaggaagtatagaaaacaattccgcatttgtaaccaacagtttccatgtctttcgctctaaaaaaatagccgagcttattggatataaaaatattgttgaaatttcagcatatactccgaaggcttccaaaataagcaactatttaagagagggtttatctattataaattactatctcaatctgcggcggaaaatcaaaaaaatgcaaaaaaacagtagagactatggtaataatataaaatattagtttttgatactacaattatgttacatgactaaaaaaaacttgacgaattatatgttcattatgtataataaacacaaagaaattatagacatatatagaatataattgaaattttgttaaatttttgtcatattatggagttttttccttaaccatgcagttttttctgcgtcttaatgattttagaaaaaatcccagttttttttatgtatttgtaaaaaaataaacttatatattttgttgttatgggaggttttacaatgggtattgtagacattgcaccgtggattgttttggccgcttcaatatgtggtctggcttttgcgatgtacaaatttttctgggttaaaaaacagcctgagggaacaaaagaaatggcgaatatttctgctaaaatcagaaaaggcgctatggcgtatttaaagagacagtacaagacagttggtattttctttatcgttatgctgataattatttgcgtaatggcagcgtttggtcttctcacatggtttgttccgttcgcatttgtatccggcggatttttctccggactttcaggatttattggaatgaagattgctacatatgctaactcaaggactgctaacggagccaaaaacagtttgaataaaggcctgaaggtagcgttttcaagcggtacggttatgggtctgacagttgttggcttgggtcttttggacataagcgtttggttcataattttaaaagccgttctgagtgatccgaacgagattatggcggctatgctgacgtttggtatgggagcaagctctatggctttgtttgcccgtgtcggcggcggtatttttacaaaggctgcagatgtcggcgctgacttggttggaaaagttgaagccggaatacctgaggatgaccctcgtaaccctgctgttatcgcagataatgtaggtgataacgttggcgacgttgcaggaatgggcgctgacctttatgagtcatatgtcggttcaatcatatcaacaggcgcgcttgccacagcggcaggtttgggctttaagggcatagttgttccaatgatgattgccgctataggaataatcgcttcaattataggtacgttctttgtttctacaaaagagggcgctacacagaaaaatcttttgggttctttgagacgaggcacatatgtttcggctatactttcagctatttcagccgcagttttgatatttacactgcttccgcagaatacaggcgtattttgggcagttatatcaggtctggtagcaggtgtgctgataggattctttactgaatattatacatctgattcatataagccgacccaaaagctttctgagtcatcaaagacgggaagcgcaactataataatcgatggtatagcgctaggtatgaattcaacagcaattccagtagttatagtgggtatctcaatccttgtcagcttctttgctgcaggcggcggcggtttcctagccacaggagatttgagcagtttctcattgggtctttatggcgttggaatatctgctgtaggtatgcttgcaactttgggaataacattggctacagacgcttatggtcctgttgccgataatgccggcggtatagcagaaatggccggccttgacgaggaagttagaaaccgtacagacgctttggattctttgggtaacactactgcagcaaccggtaagggatttgctatcggcagcgcagctttaacagccttggctttgatagtttcttatactgataaaattcaggctcttggaggacagcttcagttgtcgctcacaaatccgcctgttttgattggtttgtttgtgggagcaatgcttccgttcttgttcagcgcgtttactatgcaggctgtaggacgtgcggcacagaaaattgttgttgaggtaagaagacagtttaagcagataaaaggtttgatggaaggcaaagcggaagcggactatgagacatgtgttgatatctgcacacgttcatcgcttagagagatgattttgccggcggctctcggtatactcgctcctatagttgtaggtttggttctcggagtaaacggagttgttggtatgctcgcaggagctttggtttcgggatttgctattgctatcatgatggctaattcaggcggcgcctgggataatgcaaagaaatatatagaagccggaaactttggcggaaaaggtagcgacaatcataaggcggcagttgtcggagacacagttggagatccgtttaaggatacttcaggtccgtccgttaatattttgattaagctgttatctatggtttctatcgtttttgcagcgcttattgttaagtttaaccttgtggatttgattaccggtttactcaaataaaggagtgacgattagatgaaatattgtaccaaatgcggcaatgcgatagacgataacgccgctgtatgcccaatatgcggagaaactcaaaagacagagggttctcagaaccaaagcggtacatattctgattttcatagtgttaaggaaaaaggtccggtcgggacagctatagccagttttataattggtattataagtttggtactctgcaatacggttataggtccgattgttggcctaatactgggtatagtggggacgaaacagtataaccctgcaaggaatacgagtaagtggatgggcgtttggggaatagtactaaacgcattgtctatcattgctttaatcgtttttattgctgtcgttatatatttatactcaacggggcagcttgaaccggatatagatatagttaactaaccgtattgcaaaaatagaatttgttatatataaaaacagcaggttaagatatatgcaatatggggttgacattatataagaaatatggttaaatgttaaattaaataattacgctgttttgccgccgggtaaaacagcggagcgtcagactttctatcatttggtctttgaagatagaaagctggcgctttttatgaataaggagacaagatatatggagcagacaaactgtttaaaagacttcattcgctatacttcgcttaatgttctcggaatgataggtttatcattttatatattagcggatacgtttttcgtttctaacggagttggggcgaatggtctgacggcgcttaatttggccgttccggtatacagttttattcacggaagcggtttaatgtttggtataggcggcgcgtctaaatattctgttttaagaggtcaaaaggcataccaagattcaaacagagtattcacaaacactgtatacgcggcaggtctcctgtcagtgatttttgtgctgctgggagtgtttgcttctaataaaataactgttcttttaggcgccgataatgaagtgtttgatatgacaaaaacttatctgagcgtgctgctgtactttgctccggcgtttataatgaatgacgtgctgatttgttttgtgcgcaatgacggaaatccaaaactgtcaatgtccgcaatgcttgccgggagtttttctaatattatacttgactatatttttatatatccatttggtatgggtatattcggcgcggttttggcaaccggttttgctccgataataagtatgctgattctgtcggtgcatttcagaaataaaaactgctttcgctttaaacttaagagacctgatttaaagctcataggcacgattttttcgttgggaattccatctctgattacggagctggcttccggcatagtaataattgtctttaatataatcatactggctattcaagggaatgttggagttgcggcatatggggttattgcaaatatttcgtttgtggtcgcgtctatttatacgggtatcgctcagggaatgcagccgatagtcagttctgcatacggcaggggtaatatcagcagcgtaaagtttgctttaaagtatgcggtggtaacaatgctggcggtttcagttttggtttacacatgtatttttatatttgccggaccgataacaggaatatttaacagcgggaataatggtattttgcaaagtattgcagaacagggattaaaaatttattttacggcggttccgtttatgggtcttaatatagttatttcaatgttttttatagcggttgaaaaagcaattccagcacagacaatctcattgctccgcggaattgtgcttataattcctatagcgctacttatgtcatttttagcaagtcttataggggtatggctgacattgccgataacagaagggcttgtagctatcctcggcattgtgttatattgccgtgttaagaaaagattattatagagttactgatataaaggagaagaaatatgtttagagagatgcgcagaagaaaacagtcattgtccgatgaagaaatatcggagatattaaataatggtacctcgggagttttggctctgtcgggagacaatgattacccgtatgcagttccgctcagctatgtgtatgacggttcaagcatttacttccatgccgcgaaaaccggacacaaaattgacgctgtaaaaagaaataataaagcgtctttttgcataatcggtcaagacgacgtggtgccggaaaaatatacgaccaattataagagcatcattgcctttgggaagattcggattttagatgatgagggagaaaaaagaagtgcaatcgaaaagctgacggtcaaatattctcccggggataagacggacagagaggctgaaataaaaaaggaatgggataatttatgtatgcttgagctgcagattgattatattaccggaaaagaatcgatagagctgacaaaaataaaatagaaaaaaagaagtataatttttttaaggttaaatagcgtatacgaaattgatttatattttaattagaaattaaaatataaatataagaagcatgcaaagtggaaaaaacgcaaagtaaatttgacgatttgtttaagtttgcttttatgtgttatacccatatttaaaaaactaaaatgaatttcagataaaatactgaaaagtaaatcgagctgccaagaacagttataactatattttaattgagaacattgtaaataattctttatagtaaaaagttatgtggtttattataaaagcaagtaaattttcagtctgagagtacagaataatatatttaagtaaaatatgacaataaaaaaacttaatattttataacttcggtttataaagtatgtttttatataaaatacgccgcctgttttcaggcggcgtacggcgtattttattaaattatataataaatatagaaatcttagccaagttcagagaaatatttgattgttctaaccatctggctggtgtaagagttctcattgtcataccatgatactgtctgaacctcatagaggtcgtcgccgatttggttaaccattgtctgagttgcatcaaataatgaaccctgagtaataccaataatatctgaagatacaagctgttcctcagtatatccgaatgatgctgattcagcagctttcattgcagcgttgataccttcaacagtaacatctttgcccttaactactgaaacaaggatagtagtagaaccggtcggtacaggaacacgctgtgcgcttccgataagcttaccgttaagttcagggataacaagaccaattgctttagcagcgcctgttgagttaggaactatgttaacagcgccggcacgtgcacgtcttaaatcgccttttctctgaggtccgtcaagaatcatttggtcgcctgtgtaagcgtggattgtagacatgattcctgattggataggagcgtagtcgttaagagccttagccataggagccaagcagtttgttgtacatgaagcagcagaaataatcttatcttcaggtgtcaaaattccttcgttaacgccaaaaacaacggttggaaggtcatttcctgcaggagctgaaataactaccttcttagcgccggcattgatatgagcctgtgccttatcctttgatgtatagaagcctgtgcattccaaaacaacgtctacatcaagctctccccaaggaaggttgttagcgtctgcttccttataaatttcaatttcttttccgtcaactgtgatagaagactcgccggctgtaaccttatcgccgagagcgtatctgccctgagctgaatcatacttcaaaaggtgagcgagcatagtagggcttgttaagtcgtttatagcaacaacttcataaccctccgcgccgaacatctgtctgaaagccagacggccgatacgtccaaaaccattaatagcaacttttactgacatagtaaagtacctcctaaaaagatatatattgttttatattttgcagatttatcagctatcggaacagcgaagcctgtaagtaagaataaaaatacgcctcttagccgacagcagtattattttacctcaaacggataaaatattcaagtattttttcgatatttttttaacgattaaaaaaataggacaatttaactatatgttgacaccataaagaaaatgaattagtcatttaaacaatgcaaatgttttcaatctttgcttattagtatacacaaatcctttaaatatataaacaagcatcagaatataagaacaagagtgatataatattaagatttttattacagaatataatatagaagtttaacaagttataatgtgctgaaaaaatcatttgtttatttcaggattatcggtacgccctactagataatctattgacacattaaaataaagcaggtgatttaaaaatatgataaaactgtatgcaagtatagagattatgcagttagatacattttattgtttacctgattctataaaatcctttaatgtgaccggatgataaagttctcaattccaaacaaaataataccattataaaaagacaaaatcaagtcataaatttaaaaaagaataaaaggaagtttcaagcgtgaagaaattttaaaatacataagttggaggggaaacgtttgagtgtactgaaagaattgtattacggaaatataaatcctcatgaaaaacgtgttgtcagcaatttagaatttgaaaaacatgtaaaagttatattagaaaatgaagaaaaactaagcataacactgaagaatgaggaaaaatatctttttgaacagttattagccgcacatgaagaagtttcaagtctggaattattggaatattttattgaagaatggaaactgggcagccgctttatgcttgatacttttattatatagaataaaataacattctggactaaagttttaaagataatataaaaaatgagatttttatatcttaagtattatgcagttaataaaaattattaataatagagtcaattgccgtctgtaaaatttattttaagtacattatagcagtatctaactaaaattattgtttatatcctgcatgttgcaatgtttgttcccggacatgcggtttcagatgtatttagactataatataataggtttaaaattaggtcgcttgttaataagcagctgatttgattcatcttgttattataagcgcagtaaaagtttttttggctcgcctttaaaataatctttatatactcaaaattgttataattttattgtgcaatttatacaaaagcggcaatgttgaaaaaaatcaaatgttacagaaatgttacagaaatatttatcttatgttacaaaaaatgaccgcaagatattggcatcaaaaattttgtaacacaatatattgatttttaaaaataaaattatataaaaatacggaaaattttgtgggaaatattttggccattttgtgaattgcaaattaacaaattgtgaaaaaatcgggattttacttgattttccgagcctgccgtggtatactgtgtgcacagtttcggttttgaaattggaatgcttgctgaaatattttgtatattggcgcaccagtatcaggagttttcagcggcaaaatttttgaggtgattattttatgcgaaaacacaaactattagcaggaacagtactaatactgtcgatgttaatatttgctctgccggttataacggcatcagccagagaattctctgacgtacctattaccgcttcatattatacggcggtggataagttgagcaatatgggtgttattcaaggtagagaagatggaaactttgctcctgaggctcagactacgcgtgccgaattctgtgcgtttatgtcaagggctacaggctataatgaaacttattacacagcgggagacataccgttctctgacgttcctgacgggtattgggcaaataactacatatcttattgttatgaaaagggatatataaacggtatgcttgacggttctttcgctccggctgatccggttacatatgaacaggtggttaaaatggtcgtatgttcatccggtgccggcgatgaaagcctaagaagcgttggcccttattggtattcgggttatgtggctgtggcagaaaagtatggtttgcttcagaacacgaagaagactgtgggtaaggacgctaacagagcgtttgtggcacaaatggtgtataactctttgagttttattaacggcggtgatttggacgattcaaatcagtcgtcgggtgacgcttccgatttgtcaaataattcagcatatcctacagcggaaccggaagaaccggaaaacacagatatttccggtgaagatatatttgatgctaccccggctcctacattagcgcctacaccggacccaacagcgtttccaactccggatccgacagccaaaccgacattggctcctacgcctatgccgacattggctccaacaagagaaccggttattaatgaaccggtatataaaccttcaattccgtctaataatggtcttactgttgtaatagaccccggtcacaattacagcggcgttgatacaggcgctaccggaaacggtttgagagagcaggatataacctattatatcgctgaaaaggttaagcctctgcttgaagagagagggtttaatgttgtaatgacgcgtaattctgtttatgataactgttctacagaatctacgtcagccagccttgcttacaggtcaaatttagctaacagtattggtgcggatttgtttgtatcaatccattgtaatgcaggaggcggaacaggaaccgaaacatattattattacggcaatgctgatggcaaaaggttagctacatatattcagaactatgtgacaagttctcttggtacctctaacagaggtgttaaagaggcagggtttgcagttattaaaaataccagcatgacggcgatacttcttgaaactgcatttattgatactgccgccgacgcagctaaactggccgatgatggctgtcagtggagctatgctgaaagtatagcgcacggtatttgtgattactttggtgtagcgtattagttgatgtttattaataatattgagtaggcagcgcacagcctgctcaatattatagttatttaaaatggtttacaaattaatattagggtgtcgggcacatatattatgtgcctttatgcgtgtctagggaaagatagggggttaattagatgaatagagataaaacaattaaaaagccggaactgttggcgccggcagggaacttggataagctgaaaatagcattaacttatggtgccgacgctgtttatatcggaggagaagaattttcgctgagagttgccgcggataatttcagcgcagatgatattcttgagggtgtgaagtttgctcatgaaagaggtaaaaaagtatatttgactgctaatgtgataccgcataattctgatataaatgaatattcagagtttttagaaagtgttaaagacagcggtattgacgcggttattttatccgatttgggaatgtttgcgttaactaaagaaattgccccggacttggatatacatgtgagcactcaggcgaataatgtaaattggaaaagtgctgaaacatggtataacatgggcgcaaagcgggttattttggcccgggagatgtctttggacgagataagggaaattcgggagcgtacaccaaaagagttagaactggaagctttcgtgcatggggctatgtgtatatcatattccggcaggtgcttgctgagcaactatatggccggcagagacagcaaccgcggtgaatgcgcgcatccttgcaggtggaagtattttctaatggaagagcagagacccggcgaatatatgccggtgtatgaaaatgaaagaggtacgtttatatataattctaaagacctttgtatgctccagtatgtggataagctgatagaatcaggtttgagcagttttaagatagagggcagggtgaaatctgaattttatgttgccacaattgtaaaagcgtatagaaaggctattgacgattattttaattcggatgaaaattatgtgtttgacactaagctattagatgaagtgaaaaaagtcagtcatcgtgattatacaacaggcttctattttggaaagcccggcggcagcgaacagcactatgagagcagctcttatatacgcaactatgatatggtaggaatagtaaccggatatgacaaagagacaaaaatggctgaggttattcaaaagaatagattctttaaggggaatacagtagaatttttaaggcctttcggtgattttcacgctcaggtgattgagtatatgaccgacggggagggcaatgagatagaggttgccaatcatcctcagagcgttgtatatattaaaagcgagattgaactggagcccgatacttttataagaatggaaagaaaatagaaactaaatactgctgagggttatattggattattttcagctgctatgcttaaattagccgaataataggataaatattcagtggttataagttgtttatctattgacttttttcgataaacatgataaaataaacttcgcatttgtgcgtcatatttgtgcgcgagtctgtttggaatttaatggacaagcataattatgaaaatttatacatttataaaataaataaatatttttatttggaggggtaaaaaatgaaaaacattaaaagagttttgtgcttggttttgacgcttttgatggttgcgtccactgtatctgtttttgcagctttcagtgatgttccgacaacagcgtcatatgaaaaagccgtttcagcactaagccaattgggcattatcaaaggttatgatgatggaacatttaagcctgataatgatgtaacccgtgcagagtttactgctatgctgatgagaactatgggagccggttctataggttcgtcctcatctgcagatttaccgttttccgatgtttctgaccagaattctgatatttcatggtctatcccgaacatcaataccgcttataaaaatggtatcgttaacggttatgaggatggaactttcagacctaatgacaaggttgcttatgaagaagcagtaaagatggttgtttgcgcgcttggatacggagaaaatatttctgttgacgcaactccgtggtattcaaacttcatggctcaggcaaggtctttgggtatcttaaaaggcgctcagaacttaggttctgctgagaagccggcttcacgtgcttgtatagctcagatgctctatgattcacttgaggtatctcttgttgaaaacggcgtagtaacaacaaagacattcctcgctgattatctaggatacattaaaaatacagggtatatttcagcaaacgatttgacaagtcttgacgacccggatgttaacctccgcgagaatcagatacagattcgtgcaaaagagccgaactctacagtttatgaagttcatacatacgctgtagataacgcagctgaatttacaaataagctcggatatcaaattgatttcttctatcctaaaacatcagctaatgatacaatccgtacgctgttcagttatgagataaaagaaaatgcaactcttgaactcaattcttcaatgattgaaaaagacgagtctaataatacaacaattaagtattatccaactgagacatcatcgcttacaaacgctaatttggcatctgacaacattgttatatataatggaaagctttatggttccaatgcggacgcaagcagattctctacagatatgttccctaacgtaggtacaataacagtgctggattctgataaggacggcaagtatgacgttgttactatttgggactatcaggtatattatgtatcaaagaaatctacaagtgattcttcgatagttgataatgcatcaagagcgactgataaaactttgactttggatgttgataaagacactaatcttgaaatagtagataaaaatggaacaaaggtttcgttcagctctatttctgaaggtaatgtaatctgctatgcagtgagcaactatgctgagaatggcggcgaacagtattcaagagctgttgtggtaactgacaaggctaccggaaacgtatcttcaacaatttccggggatgaaatgtctattggcagcaattcatataagttctcagacgcggctccttggatggagaatggaaatgacggttcacttgaggaaccaaagactggtgacaatggaacatatgccctggatattttaggtaatgtgtttgcgtatagcaagagcaatgaggtagttaaccaatattatggatatgttttggcttatgacgagggagaagctactttctcatcaatagatgattttcaggttagaatactaactcaaaataattccaaaacagattttcatatcagaaagggaaccactgttaacggtgtaagctgttctacagcatatgactttttggacgctttgagagaaggcgcgtcttatcagaagaccggagaagttggtcatacagacgtgcagcaggtagttaaatatacttatactacttataaaggaaaccagtgtatagatactctttatactgtaacccctgacacggatgtaaaagacggacaaactgttgagtcagataagctttataattttgctaatcttgagcgaggagaagtttcattaaaatatgctaacagtaaacttagcagcggaaatattcagctttcagtcggaagctctatagtttttgtagttccgccgcaggatcaaagaaatgatacggataggtttaggaaagcaacaaacagctatttcagcacaaataagacttatgacagcgttgaggcatttgatgtttcaaacacaaattccgctaaggtagttgttgtatacggcggaagcgccgctacggaagttgacgacagctcgccgatatatgtatttaatgataagccgagccagcagataaatgcaaacacatctgatacaatgtataaagtttcaggctttaagatttctaaaacttcaactaacggaacttttgacgattgggcttcgctttcatcaaatagtgtagttaagaatgcacagattggtgatatctacagagtgggcgaggacagtgacggcttcaagacatttaaggatgaatatcgtctgtatcctgctgacgaaggttatatcgaagtaggaagcggcagagtttcaaattggagtagcgctgatttctgtgttatttacggaagcgtatatgcttcagattccagcgaaggtatggttatcattcctaagtatataggccagaatgatgatgtaagcggcgaagaccagtatactatttctgcttcaagcttctcaggagctaaaattcttaaatactccgagaatggcggaaagacggaaatagttgacgcaacttctgataaagaagcaattatggatggtatagctgagtataatgaaggtcttaacccggctaaagtattgatttatatgtctgaaggaagagttaaacttttagctgtaacagaaggatattaatatagaagtaactaaaacatttgaccgcgggtatttaatatccgcggttttgttttatttatagaatcactttttgtatataatagtagaatatttacgtattattataaaatattgacattatgtattttgtgtgttaaaattatactcgttaatatttatggcagttagatttaaaaatttattttatatgcgtgagtaatggacctaatatttaggaggactgtttggttatggttattttaactgaagaagaaaaacaagaaatgtgtattgagcttgcggatcatttgcctaaaatcagagaattgctgaagctgtcacaaaaagcattcggcgaaagatgcggtatttcaacacccaggatgtctgtgatagaaaataaacactttgttatgacctggtctcaattaacatcaattatgtttgttatagtctgcaaccaaaagacaaaggaatacttttttactaatagtcttcttggcccaaagtttttgcagtttatacagcaaaaggaagaaaacagtgtgcctgatgtgaatattatggtagacgaagtttatgttaacaggtataaaaaacaattctttgatgaatacataaaaataatggataataataactaagattatacgcggcgctaagccaatagtgaaagtatttatcaggacgcattaaaccgtgtcctgattttttgtattatgtaagatttcgacttatttagtatattatttgtaatatattagggaactaatagcacaaaattattaaaaactaatgaataattgcctcattgttttggtttgattgactaatattaaaaattaatgtataattgactttgtctataatgagaattttatctacaaatgcaggtttgcatttgttaatgatacataattgctcattaaaataatatagtaaaagtttattttaatatattttagggggaattggaatgaaaaagttgagaaagtcaatggcattacttctagctatggctatggtgcttgctactttcggaattactgtcgtttcagcggcagctttttctgatacaagcggtcattgggcagagtcagtgattgacaagtggagtaatgcgaatgtaattaatggttatgaggatggaactttcctgcctgacgctaacatttcaagagcggaactggcaaaagttatatctgcagcaaaacagttcacatcacttgctgatattaatttcagcgatgtttcaggtgatgaatggtttgtatcagatttgagaaaatgcgttgctcagggaattatcggtggatatgaagacggaacgttcagacctgatgacgctgtaacgcgtgaggaagctgctacaatgttccagcgtgcttataaaataaattctataggattgttaaacttctctgataacgattcaatttcagaatgggcaaagacctcagtaaccgcattggttggagcaggtgtaataaacggatatgaagacggaacgtttatgccttccgctcctattacgcgtgcagaagttgtaaagatattagacggaataactgcagctgctgagagtccttcacagacatctaatcccggcggcggtacaggaacaaccggcggaattggcaacttaggcggaggcggttcttcaggcggaggcggcagcaataataatcagaacagcaattcatcaaatgtaacgctcaacgccaacggcggtaagttttctaatggctcaggcacaaaaacagttactgttgcaaaaaacagtgttttaggttcaaaagcagttacgccttctcgtgaaggatatatttttgatggctggtatacatcaaaagacgcagcggattctttgatagcgtctaagaaatgggatgtagattcagacgccgtaactagaaatatggttctctatgcagggtggtatgcagaaggaaaatccatagtttcttttgaagttaacggaggaactccttctgtgagcagtcaggaagttgagaccgggggttatgcggctgagcctactgatgttgtaacgcgtgaacattatacgtttgttggatggtatgccgacaatacttctaaaactccatttgattttaaaaacacagttataaccggaaatacccgtatatatgcaagatggcaggttaatgctgagtatgcggcttcagagattactatgccgacaaaaaccgtaggtcagtatcagaacggcacaattttgcctgttcccccaacagttttacccggtgaaaaagtaactcttaatattactcctccggatggtttttctgttgacagtattccgactataacttataattctaaagtttcggatttaagtgttactattgaggcgaaaaacataaaggataatggggataactcattttcatttgttttgcctgatgatattcaaaatggaacagtacaggtttctccgcattatgtagaagctttgccgacgaatcctccggtacctacagaggaaccaacgccgacaattgatccttctgaacctactgcaaagccaacggttgttccaacatattatttctcagttcctgagttttctgaattgtcgtcattcccggctaaaaccgaaatagcgggcatgacagtcagcgctgattcaagtattgagtccagctcaaagcagtttgctgttacaacggataatcctgacaattctggatataagtattcaaaagtatgtaaaattggaaaagcatctttatcatttaaagtttcaggttcctgtaaaataaagattgatgcggtttcagcaaatagctcggccaatagggcatattcacttttagacggcaataataaggtaataggaacgttcacctgtaaaggggatgcaacaaacagttttaatgtaggttatattggagaagctacaacgttgacaattaagcctagcgatggaattaatctatacggtatatttgttgaatatggcggagatataccgacccaggctccggcaacgccgtctcctactataaatccggatttgagatatcagataaatgtttcagatactattcaaaacggctctatagttgtaaataatggaaatatttctagtgacgaaattaatacaatttcttggaatgccagtgatattattccgagtgattctgttgaaggagaaacaattatatacccggcgggaactgttttaccttttaatggaaagaattctgacgatggtactatcacgatgtacgatgaagtaagctggtataattttgaggatcctgagaggggaagtgttgtctatgttagaggtgagcttaacccttctgcaaacccgccgttcagtgaagacaacgttcctggcggaaacgtgtttatggttaaagcaggacacagtggatatttgactatagacgcgtatgtgtatacaaacaagaacttcaaactttatgataatgtggataaacagtttatcgaagacttcacaacgtctgagtctaaaatttattcgtttaccttcccgtgtgaagagggtggagaatactatacttacgcattaggttcaaaagtaggactgtgcaatgtgacttattctacaggtattttggatgcaaaagccggtcagccaataacggttgttacaaaacctgataaaggctataaggcaagttctgtgactgtagatccggaggtcactgtaacaaagaagggtgaaaacacatatacgtttaatatgcctgcatcagatgttaatgttggagcttcgttcatagacagtacagctaaagaatatactgctaccgctccaaagccggagaacggcacagttaaattatctaaaggtgcagcagcggcttctgctgaactcgcgtcggaaaaggttaccgttcttaattcttcggataatttcttgatgtctgatggaaccggtggaaaatggattatttctgcagacggcaatgcagaaaaggtagttgatgacagttccgatattggcggaaatgcttcctctaaaattaagcttatggataaagctgtacaatatgtattgggtgagagtataaagtccggagaatttgagctatcatatgatttttatgatgataatacaaatgcagcgggccgttctttcagaacttatcttgacagtgcggctcatccgtatgatgaaacaaccggtcaggctacagagtttaacagtgattcagcattcttccatatgatggatgttggttcgaaggtctttgtaacaaaatcagtggatgatgtagccggaaaggctgaggcaggaattcaggttggttctgccgcattagaagcttcaaagtggtatagagttgtgataaagggagaacttggagcaacggatccatttaccgtttcatattatctgcatggaacagacggaacatataatcctgacaatatttcagcaacacctgttctgacaacttcagaggcgcctgttactgacggcagaactcctgaacttgcacaaattaagtttatgagaacagcaagcggaaatctttattacgataatattaagctgacggcagataatggttcggctgaaactggagaatttaaactgaaagcatataatggggaaactgttaacattgaagcgattcctgacagtggttatgatgtacaaagtgtggaagttgttgattcggcaggttcaaatgttgatgttaaaaatagcgcatttgtaatgccggccagtgacgttaccgtaaatgttacatttggcaagggagcgccggcaacggcaacaccttcacctttgccaaccagtataccgggaccaaccaatggccctgaaccaactgtagatcctgccggtgaaaccaccgcctgggtatatacagttgagaattgcagttctttgggcgaagttgacgccaatggaaaattaaagataacaagtaattcaaattataatggtatgactatttacgctagtccaagcaaagctattgagattgatggcagcaataagacttttgacgacggcgaaaaatattcaggaagattaaaactcggcggagctggaacaattgatggagaaaattcaagcagagctatgagttttactccggataagtatggagcagtaagtatatactttgcccatgcgtccagtcagggcacccctcgcgtgatggttgttgagcagaatggaataaaggccagaaagagcgtagacgccaatactatgtcgatatttaccgtcagcgtttatccgggatctccggtatatatttatggagaaggcgcattgaatgtatatgcggttaagtatacaaaatctacaatggaaaacccgccgacaatgccgccggtaccaacctcagcgcctaccaatgaacctgaaccgacaaatgatccaatcgaaaagccgacaaccgctccggagccatctgcagatccggttgttccgactgcggagcctactgctgtgccaagcgaaaaaccaacagaaggaccggcagcggagacagaggttttatttgaaagcacatttgctaacgaaacagttgggacagtaattgatgcttcaggcgatagtcttggcggaatggcattagacactatggctgaaggcagcacaattgagattgttaacggcgaggaagcaggcactgacgtaaatgtagctaaaatattaaagaaatccacgcctgcaaagacagatcagataaagttgttctggactcctgaaaatggtgttgaaataacaaaacctgttattatgacagctgttgttaaaaatgcaggagcaaacgttggtacagatatgtgggggctgtatgcaaattcagccggttcatcagtaaactatactgacaaaaatggcgtttcaaaaacaacgacagttatagcacgtattggcggaaagggtacagttttaaaatatacggcgtttgaagaaccaacttcatacagcggtacatgggcttatgacgaatggcttacaatgaaagttgttattgagcctcttgaaaataacagttataaagtaactgattatataagccaaggtattgatacaaaagattttaaagagctcacaagcagaacaataacttctgaagacggagagtttaatggattgcttacaaatgtaggtttcctgtcaggtactcaaacttcagccgattcatcattctatgttaaaagttataaagtagagattgaaaaatagaataagcatataatagcatagaaataaaacacctgtgcagtaaatatgatttgatatcataatttgctgccaggtgtttttatttatttaatgtaaaatttttcgagtatttctgccgcatctcctactaagtcaacgcatgggcgttttttataatattcttttgagcgcgctgatggaatatggctgtcagcctcacctctttttagatccagccctaataattctctgcatataatagaaccatttttttccttaaactttccggcacattcctggacgcgcttatagtgctcagttttctccgcaaatgcttttgggttagaatatccaaactttaatcctaaaaccatcagcatgcctgaaacagtgccgcaaacttcccgcatcctccccattccaccgccaaaggatgaggagattagcatggcagttgtaaagtctatttctatatcatcagaaaatgctcctaccactgcctgacagcagttgtatccagctttaaacagtttcattgcttcttctcttctactcatttcttcctcccgattataaatagtaattattataaatataacagaaaatttaccaagttacaatattaaattaaaatattgatatttaaattaagatgtgttaaaatacaattataaaaataaagggtggttattgttttgaaaaagagagatagtttttcggggagaatcggatttgtgttagctgccgcgggaagtgcggttgggcttggaaacctttggaggtttccttacttagtcgctaaatatggcggcggtatatttctgcttatatatttgattttagttctaaccttcggatattcaataatgacattggaaattgcaattgggagaaaaaccggtttgagcccggtgggagcattcagaaagtttagtcaaaaatacacatgggtaggttggctgactgttataataagtactattatattaggatattattcaataataggcggctgggtcataaaatatctggttacattcataactaacagcggttcttttgcggctgcagacgggtattttaacaatttcatttcacagccgtatcaaccgatattatatggcgtaatattttcactagccggtcttggagttctgctcggcggagtcagaggaggtatagagaaggccggaaaagttttgatgccgattttgattataatatcaataattatcgctgtatattcagttactttaccgggagctattgagggcgtcaagtatatcttaattccgaatttttctcattttggatttgaaaccgtagttggagcattggggcaaatgttttattcaatgtcgcttgcaatgggaataatgataacatttggctcgtatctgagtaaggacacggatattgagagaagtgtaaaaaatgttgaaatttttgatacagcaattgcgattttagcggccttcatgataatacctgcagtttttgcatttccggccggcgatactccccaattagatcaaggcgccggtttgatgtttataactttgcctaaagtatttcttaagatgccgtttggacaagttattggaggggccttttttattctagttgcttttgcggcgttaacatcgtttatttctatagcagaagtgttaatatcaaccctgtgtgatatatgtaaggttaagagaatccctgcggttttgattgtggtggcgtcggcctgtattttaggtataccggcttcgctgggatatggcgcattggattttgttaaaatattaggtttttctattttggactttatggatttcatagcaaactctctgctgcttccgcttgcaggccttgcaacgtgcgtcgtatttggatggtttgttggtcttggttctatctctgatgagatagagctgacatcaaaattcaaaagaaaacgagtatttataattgttgtaaagtatttggctcctgtatttttaggcgtcatagtgctaagcaatatattgcagatacttggggttgtcaatatatagcagtcttttgaaatttttagtaaattattattttattatgttcgaatatgagtgaaagtatttgatttttgataacaggagctttatataactgtcaaaaatgaaaaaaacggtcaaaaatacaattctttcaagcaaaataactgtaagttttctgataaatttgtgtttaattgttcttttcattgacttttggaacaaaaggctatataatgtatagtacctggctgtatctatattttttgatacagttatgaattagataaatattaaatcattatatatttttagggggaattaaaatggtaagaaagaagcttaaggctattcttgcgttgcttgtagcagtgatgtttgtgcttcaggcggctccgatgtattcttttgctgaagaatcagctaaagatgccggaactgtgactgcggagcagcagtctgagcaggcgcaggaaactgctaacgatgaaaatgaggttcttctaaattatgccgttgatgaaaatggcaataaggtagaacttcctgaaggcgtagattcaggggctgacagcgacgccgtcgcaacaccagaacctgtaagtgaaaatttgtacaaggctgatgatacaaattttttccagtatgatgagggagatgtttctctcagtgctgaaaatgtagtttttaatgaaacttttgatggaagcaatgttggagacactactgttcctggctggtatttcgcttctgtttcaaaaaacggtaatgagaaaaaatctataattcaagttgacaattcaagtgctggaaacgcgctcagaatgaataaggtgaaaaatggtgcagtaaatgacagtgcttcatccggtgatgaaagcttgtatgctgtacacaattttgatactcccgcaaagggagctattgctgtttctgcagatgtatatgtagagaaagctggaagacttggattgtttttctacggaaagacagataatattgaagaagctgttaacactgaagctattccttatttaggaagaggttatttttgggattcaggaaaagcaggtcaggatcctgataagaatactccttatggtatatctacttggagcgataatactagaacttcagatacagaagtttcgtattcaacaggtaaatggtatacgatgagatgtgacataaacacggagacagctacttatacctatacaataactgatgaaagcggtaaagaaatagtttcaaagaaggatttaaagttaaatgctgataatttaaatgtctctgaaagtgcagttcaaggcgttggatttacagtaatgaatgatgttaaatcattgggtaattgttttgttaaaaatgttaaactgattgataataataatgcaaagcaggatgctgaggatgttgcggctgacaggacagcgctttcattgcctgatggatttgatgcaaacaatgtagtttcaggatttactgtaccagttgttggagcttatggttcaactattacctggacttcaaactttcctgatattttatcagttgacaatgcgactggaaatgttactgtaaatagacctgagttttccggagtaggaagtatttctacaatattaactgcacatcttgaaaaaggttcagctactgcggagagagaatttaatctaaaggtaattgaaaaagacccatcgagtgataaggacaaggtggagggtgataaaaatttacttgctttgccttctaatattaaacctgcagaagtaaccgaagattttaaaatgcctaatgtgggattgtatggttcagttatttcgtactcatcatcaaatgagaatatagctaaaccaaataatgaaactggtgttatttctataatgaggccagcgtttaccggaaacggaacacaggcggttactttgacagcaacaattaagtccggtaatgtttccgagactaagacactaataatcaatgttttggaaatggatccgaccagtgacgctgaaaaggctttatacgatgtaaataacgtcttgataggcggtattgatattgccaatgttagacaggatagtttttatctcagcgatgccggtaagtatagtgaattgagctggacgtcttctaatgaagattatataaaaataggaaaaaaccttgaaacggatgaagataatgttgttatcgataatggaggttttaaggcaacggtaactagaccgaaaagaaaccaggaagcagttagcgtagttattacagctacagctaatgttaatggggctacagcaacaaaggaatttacgctgacagtgactcctgaagatgctctaaaggcatatcccggtgttgaaggctacggcgcttacgctaagggaggccgaggcggtcaggtttaccatgttacaacccttgcacatgacggtgaaggttctttgacttatggtcttgaagaaattcagggagctagaaccatagtatttgatgttggcggagtaattgatcttacagctttaggcagaccaatcagtattaaaggtgagaagtattcaaatgtcacaatcgctgggcagacagctccatatcccggtattacgcttaagggttatggtataactgttggaagcgcgcatgatgtaatcataagaaatcttaaaatcagaatcggagatgtttttgaagataaccagcttaaccagtctgacccattaagtatcggagcttcaaagaatgtgataattgatcactgtactcttcagtgggctattgatatgtctttccgtattaccggtgagtatattacaatgtctaatactatgatgggcaaatccctttatacaaactctcctcatgaaaaaggcggacattcatatgttggtatgataaatgagggtgctagaaagacaacattctctaaaaactttgttggtgacagtaatcagagatctcctcgtattacggacgctgactggatagattcctacaattgtctgttatataactgtggtaatggttttgatattttcaactatgagtggcagaataaaaatgcaaaaatgaatatatacaataactatgcccgtatgggtccaagtatgtcaaacggaaccccgtacagagccggacgcggacgtgattattccggcggaataatggtatactttgagaacaattatggaaaaggtacaagtgaaggtcttcagtcaaaggcgacaaataacggcgcaataaagaaagagttagaatttggttctgataatggtgctgagccaggttcagcatttgatttgagcaacgttactcttgatgaatggaatactaatccggcctcatatgataataacggaaagaaatcacctgcggctactttgacatatatgccttatccattccctgcgccccgcggtgacgtaatggaagtaatggatggttcaacaaacaatataaagaattatgctgtaagcgacaatggaatgggtgcaactaaaccggccagagacctctatgatacaatgatattaaaagagatgcgctcaggaggaagatacaataagagcgacccgtattcattgaaagtatctttagatgaaagtgagataacacctttctttgaagaacttgagagaagaactgatatagattattctgcatataaaacagcacgtagctggtatgttagacagggtgacggacctgttcttaaaggtgcagaagccgcagcaggaaaaacaaaaccagtacattgggatgattatactgatgtaaatgtaaatacaaatcctgacgcaacaaagaaatatgattcacactatgttaccgattttgaagttggcgattggtggggagaatactgtgggtctccgggacaaaaaacagtatatacattgtgggatgaaaaattaggcagaacagttaaaacaactgattctaactatgatcagacccgttatacattgatgaatgagaatacagagtatgttgcaacagaaagaaccgttgctgacttatatcctgcagaatgggttaagagagatttcccggaaattgctgaatatatggacaaatacagagagtctcattatgccggaagagccgattcttataagatagcttgggatggaatgggtgacggtataccaaactggtataaagagtatagaggttggagcacttcaaaatatctatcaagtgaagttaaccccgaaacaggatatacttatttagaggagtatgttcagttcatggctgacgatcagccgcttgaggttgacgatacgcctgcttctattgaaaactttaaagttaataatttgggttattcaacagcacaattgttctggaatacggactatagagcagcttgtgttattgagtatggaacagagcctggtaattacacgaacagtgaagtattaacttatgatgaaacaacagactattatcatacctatcatgcccagactttgattgatttggagcctgatacacaatattattataaaataactgcaatagatgaaaacagtaatgttacggttgcagagtatgacccgaatgatagtaaagagaaggctatgacattcagaacaagtatagcgccttctggttcgtctgacatacttcctgacaaaccagtcgttacaaataaagttccttatttgaatcaggtaagacttaactggacaggaaacgttgcaactgatgaaagctatgagatatattatgatacggttaacagaggaactgattataattcttatgctcataaaattacaggtatagacgctagagcaaataaacaagttgtttcagggcttaataatgatgtaacttattattttgttgtagttgctgtaaataagaatggaaaaactgcttcggacgttgtttccgagatacctacaggcgttttgttaaactttgactttacaaaaatgactgaagaggaaaagagtgcatatatgaagaatgaatatatgtatattcttggcggaagcgttacaatgcaggctgatccggatacaggtgaaaactgtctccagcttcttgacgagacaaactctcatggtgtaaatgctgataataaactagcagttacgcaagatgagaaattcacttatgagataaaaatgaaagttttatatcagaagcagacagacgctttgaatagacaaaataatgtcaccggtgatggttctgatgagcacaatacaattcagttaaacttctacaaagactctttgatgacagaagacaaagattcaacaaacgctgctttgtgggaatcagcattttcagttttctttgacagcgagtcaaagcctgtaacagaagttaacggaagatatgatggtactgttgaaaccggtacgttaaaatttgcgtcttctccggcaggaacatataatatgggtcttacaccgggtaaagatgcaaatgtaaagagagttctcccaaccggtactggttatagttccagtacttataagaacacaactagatttggtgacgcaaaatattctaatatagctgatacagataaaactcttcacggtctatggtattatcagcttggatctgcaaagtttgtgacatataaagttgttatagacccgttaaagaataatgtaaaattatttgttgacggaaaagctgtttatgaatccggtgagtttagtgaggatatggaagagccgtacaatatcggtaaggttcaaattaagtcccgtaacgatggatattcatgggtaaatgtggctagcattaaagtatttacaggggatggaacagatgttaagcctccaaagccggttccagatggaactatagccggaactggcggcggcggtggcggcggcggaaacaatagttcaaccgcaacacctgctccttcggtagaaccgtctgtaacagaggcgccggcagctactccggaagcaactcagaatccggatactaataaatattttaacgatttgaatgatgttgagtgggcagttgatgcaatcaacactttggccgagaaaaatattgttaacggtacgtctgacagagtattttcaccttcagcaaacgttaccagggcagaatatgtctctatgttaatgcgtgcttttggtaataatgtaacgccatctgatgatgttgcatttagcgacgttctttcaggcgaatggtattatgagcctattgctaaagctttggcacttggcgttgtaaatggatacgaggatggaactttcggaataaacgaaaatatttctcgtgaagatatgatggttatggcttatagaacgttgaatgctttgagtattagtattccagccaataagccttacgcaagtttctcagaccaaggcagcataagtgactatgcggttgaggcaatagaaagaatgtactgcgcagatataattaatggcgttggagacaatatgcttgatcctaagggagctgcagaccgtgctcaatccgctaaaatcatatatggattattgaagatggagggaactgttaatgagtaatatcaaaagagtaatttcaatgttactggcagctgctatggttttaagtatgtctactttcgtagcttttgccgaagattcaaccacgaatgaagaagctgccgacgctgttttaagctcggcagcaggaacagaacttgcgtcaatgcctaatgacgacgttcagtatgctgacgcttataagtttgactattctatgggcctttttgaaatgctggaggatggttattggcagaacgaaaaggttactagagcggaatttgcaacaattgttgcaaaaatgcttaaggcaaacacagccggatatccgagatacggcagctcaccatatgttgatattgacgcgtcaaactttgcatactcatcagtatgctatttgacggaaatcggtatcctcagcggtgacggaaactctgagtttagaccaaatgatcctattcttgtaaacgaagcttcaaagatgattatgtgtgcgcttggctaccaggacgcttgtgaaatcacaaacggcggatttcctaacggttacacaacgtttgctttgagacagggcatttataatggtctcagcctgagctatactgattcaatgacagccatgcagatggcaaagatggttagaaacgctatggaagcatatttaatggaaactgtagtttacagagcagacggtacagcagatgttagagtaagcgattcaaaaactttgcttactgagacttataagattaagaatgaaacaggttatgttgaaggaacttacttctcatatttgacaggcagtgaagttgatttagaaaatgaagttataattgacggaacttgctatcagtttgctgacggatatgatatggaagcccttctgggatatgaagtaaattattactacatggaagatgtttcaggttatagaagagactatatcgcttactgcgagccaagaaaagataaaaataaagaatatgatataatggcaaaagatatcgtttctttaactgctgacaaaattgtttacaatgatgcaaacgataaggaaaagacgcttacttttgacgcttcaacgcttatctcttacaatggtaagccttactatgaattaagcgatgtttcaatggcaatcaaagagggtcatataaaggttgttacacacgaaagcagcacaaaagcaagcgctgttatgattcaggaacaatttgatggtttatttgatagatataataaatcaacttatcaagttattttccaagacagtatgacagttagtcttcctgagcttaagtttgatacgtcctatcatacaggattgacattagatggaaaagctatatctccagaagatttggttaagaatgacgctattacttactgtgtaagtaaagatggtcagtatatcagaggttatgtatcaagaaatgttgtttcagggacaatttctacaactagaactgaagagtatactgctggggattatcaggtagtcactttggcaggaaacgagtatgttgtttcagcttactgcacaaaggagataacatcaggttttacaagtgatttccaaatcacatatgacggaagacttctcggcacaaattcaacaacatcaacaggcggaaattatggttatctgattaaatttgcttccggtgatgacgcgttttcaagtacgttcagaataaaagttttagacagacaaggaaaagtttctgagtatacttctgcaacaaaagttaacagcaatattaacggtgaagagaaacaatggagcgcatcagatattattaattcccgtgcttttgatgatcgtcagcttgtagtttttgatgtgaattctgaaggtaagttaaagtctttataccaggcgtttgattatacaaaatatttagacgatcctgatactttagattttggtaagtattatgatgagacaggaagatattctaatggattgattggaagttcagcaattgaagattctactttgattttcaagattccatttgttgaccgtgatcgtgatgaagattacaaagtaattaaaaagtctgatttatctaatggttcctacaacgctcaaatctatgatatcagaaagggcgtagcaaacgttttagttattcaggataaagagcctaataaagtaagcgatactgctaatactttagttattgataaattctctactgcatgggatgaggaaaatcagcagaaggtacttgaacttgacggttggtcaaacggagagtatgtttctttgaagattgatgatgatgtatctcaagctgaatctctgacattgcaggaagaaaaagatattaagtctcttgttcgcggagatgtaattcaatatgaattaggttcgaatgattatatctatacgtatagagtattgtttaattattccttgagagctggcacaagtaagtattttgaggtaaatcaggatcgccagtcaaattataaaatatcaaatgatgacctctacaccttgtttggacagagcattagggtatatgattacttcatggttgaaacaaccagtctgactgacaagaaatactatagagcttatcctacaagagaaataaatctttatatttatgatacagaaaagaatgagattataataggtgaaccgtttgatattgagcctggcaatcaggtatttataagaacaaaaaatattgatcagacagttgacatgctggttattcagtaatatagagtgtctcataaaaaggcggcagggcttaaagcccgccgccttttataaacttatcaaataaattatatagacatatgaaaataaaaaatttatataattataaatatatacacaaaaaactaaatgtgtttcataagtgcagtatttaaaataattgatggtgcaaactctgaatgtgtaaaataaaagcggcataaaatgtataaaaaagatgttatttttatgtgattatttcggcaatctattagactgaaagctattgacaaagcccgaaaaaaggagtaaaatggctgtaattagggttataattatgaggccgtggaggtaaacgtgctgaatattttgttttagaatttggaggaagttatatgaaaatcggtattacaagagccttattatatcagtactattacccgttttggcggtcattatttgagaggcttggatgcgaggttgttatttctgatacttcaacaaagccgctggttcaaaaaggcatagcggtgacagtccctgaaatttgttttcctataaaaatatataatggtcatgttattaacttgatagaaaaaggcgttgactacatattttgtccgagatttgtgcatatagagaagaattattggttttgtcctaagtatattgggctgcctgagttggttgaaaagactgttcccgaggcaaagcttcttattgctgaaattgattgtgaccgtgaggatacggcggctttgaagtgctatcttccggtggctaaaaagcttggcgtttcggctcacaaaatgcgaatcgctttggaaggagccgcggaagattttaagcggttcagagaatactgcaatatgggtctaacgctcgatgaagccgccgaggtaatgtttgagggcgccaaaatttctgatttcgcattgcctgagtttgatactacgataggattgctcggatatgtttataatgtatatgatccattcataagcatgaatataattcagaaactgcgtgagcttaaagttaatgttataacttttgatatgctggatttaagagaccttcacaaatatagagacgagtgcaccagacctatattttggacatttccggataagttatatcaggcggcaagcgttatgataaaggatttagacgttcaaggaattatacatataacagcgtttggctgtggtcctgactcagtggtgggaaaagaaatagaacacgattttgcagattctggagttccgtttatgactctgagaattgatgaacatacaggcgaaagtcatctgcagacgcgtatagaagcgtttacagatatgattaagaggaaaattcggaaggttaatgaggtgattaaatgaaagtatcttttccgcatatgggttgtgtaacaggatataaaaagctgatggaaaagctgggtcatgaagttgtaatgcctgaccctccatctcaaaagacaatggaactcggcgtaaagtatagtcctgagtttatctgttttccttttaaggtaatgatgggaacatatatagagtgcgctgaaaggggcgccgaattgatagtttcatcaggaggcaacggtccgtgccgtgccgggatgtacccggatgttcatcagaaagttttgcaggagctgggatttgatacaaaagtaattgtttttgataatatgtttaacgattttaaggcattttatgaaatcgctatgctagtcaaaaatggaaccagcaacttcaaacttttgggtatagcaagattttgttacaatcttattaagaaaatggataagcttgaaaagaaaatgaaaataatgagagcttatgagattaatcaaggcgatttttcaagaacatggaaaaaaataaaaaacatgtttgataaatgcgatacatattctgaaattaataagacgtataaaaaagcgctcagaatgtttgacagcatacccatgcgtcaggttgaggaaagcaaacgtattagagttggcatagtgggagagatatatgttattatggaacccactgtgaataagaacgttgaggaaattttaaactctatgggcgttgaagttgaaaacgttcagtacatatctgattgggtagaacataatttgattccgaaatggctgccgtttcctaaatcacatcgaatatttaaatcatcagataagctggcgcctataaactgcggcggccatgataaagaaaacatgggttgggtaatggattttgcaaaacgcggttttgacggtgtggtacatcttatgccttttgcatgtctgccggaacttgtaaacttaggtaaatttcctgctgtatcagaggagcttaatattcctattatgtcattatctttggatgagcagatgggagaggctcatgtaaagacaagactggaagcgtttactgatttaataagaaataaacattttgcgaaacagaaaaacacattgaataatgtggctgactctcttgagaacgctgcacaatcagcggcaagaagagtaggtacaaaggtaggagaggttaaggacaatttaaagacttcaccgacttcgcctgagtatcaaacaaaataattataggagttatatatgaaatattatttgggtattgatattggatcggttagtacaaacgttatcgctatggataataattataatgtttgttttaaccaatatattagggcaaatggtcagccgctggagagcgtcaaaaaaggcatgacaaaactgaaagaggctataggctgtcaggatgacgatatactaggtataggaaccacaggcagcggaagagaacttgcaggtgttctcgtcggagccgatgttataaaaaatgagataacagcgcatgctacggcaaccctccattttcacccggacgctcaaaccatttttgagattggaggacaggactcaaaaataataatcctccaagacggtatggttactgattttgctatgaatacagtgtgcgctgccggtacgggttcgtttttggatcatcaggcggaaagacttggagttcctattgaacaatttggcgagcttgcattaaccgctgaaaaggatgtaagaatagcaggccggtgtacagtgtttgccgagtctgatatgatagcgaaacagcaatatggattctcaaaggctgagataataaaaggcttatgtacagcgcttgtgagaaattatattaacaatttgggccgcgcaaagacattaaagccaccgttcattttccagggcggcgtcgctgctaatgttggaatcagaaaggcgtttgaggacgaggtaggcgaaaaggttataataccaaaatattatgatgttatgggagccataggctgtgctattcttgcaaaagaatatattgaagaaaataatataaccacacctatgttccgtggatttgaacagctggaacttgagtttaaaccaacgagttttgagtgtaacggctgctctaatatgtgtgaggtcataagggtaatctcatcagacaatgaagttttggctgtatggggagataaatgcggcaagtacgccggaaccagcaaggcctcaaggcagagtgttcgttaaatgtatgtttggaggtgattatatggaatatacatataaaaccagagggacgtgttcacgtcaaataaagtttgatttagtagatggtaaagttagtaatgtatcatttgtcggcggatgcaatggtaatttgcagggcatatcactgctggttgaaggaatggaagcgtcaaaggttattgaaattttaaaggatatcgactgcaatggcagaggtacatcatgtcctgcccagttagcaagagctttaaaagaagctgttaattaataagaaagcgccggcacatatgagtgccggcgtttttttttaggggtataaaatgaaaaagagcgggatagattaatcaaagagttacgtaactatatttatgaaaactatttttatttattacaagcgctaaaattcatttttgcattttgggcagataacctttgaagtgtaaccaaaggtttggtttttgggagttacaaattttgttttgcatacagggcatctgtagtaattatagttctttctgtccctatgaataaattctttggcttgttcaaacttttcaagaaatattctgttttcacgctgtctggcgaattcctttttggacaaaaacctgtatataaatactatatcaagaattatagccatccaattcaagaggggaagccaaaacagccttgataacatagataatacaatggacgcaattataataaacagccctagtttgtcaaacccatatcttccctgcataaagtttcgaaaactttccatattcttcacctcgtaaaattattacagttttactctaacataataaaagacgaaattcaatgaactttgtgtaaacaatttttatatttttaaaattatttttactattgcttgtaattattagcgttttgtggtagaatataccatgtgtaagcagtttatatggagggatattaatgatcaaatttacaaaaatgcatggcataggtaatagttatatttacatcaactgctttgaagaggaagtttttaatccgtcaaaaatgtctgagtttgtttcggatccgcactttggaatcggaagcgacggcctagtattgattatgccgtcggaaaccgctgattttaaaatgcgtatttttaacgctgacgggtcggaagctgaaatgtgcggaaacgctacaagatgcgtaggaaaatacgtatacgataatggtttaaccaaaaaaactgatataacgcttgaaactaattcaggaattaaagatttagagcttgatgtaatagatggcgaagtggtatctgttacagttggtatgggcaaggcggaacttgagcctcaaaagatccctgtcagtatagacggcgatagagttataggttatccgattagcgttatggataaagaatatgagattacggcggtgtctatgggaaacccccatgctgtaatatttatggatgatattgatagtttggaactcgaaaaagtcggtccactatttgaaaatcatgaattgtttccggagcgtatcaataccgaatttataaaggttattgatgaggatactttgcaaatgagagtttgggaacgaggaagcggagaaacatgggcttgcggaacaggcgcttgtgctgctgttgtggcagctgttttaaacggatactgtaagcacgacagagaaataacggttaagcttagaggcggaaatttaaaaataacttatttgcaggacggcacggtaataaaaaagggaccggctacatttatctgtgaaggagaagttgaggttccgccaatagccagatagaaattaattaataataaaggagtgttgaaattgagattaaatgagaattttttaaacgttaaagaaagttatctattttcagagatagctaaaaaggttaatgattattcagcccaaaacccggataaaaaaataataaggcttggtataggtgacgttaccttacctttggttcctgcagttatcgaggcgcttcataaagctgtggatgagatgggcgcacaggaaacattcagaggatacggaccggaacagggatatgactttctgagagaaaagattgtggactattataagaaaaatacaattcgccttgaacttgatgaggtctttgtaagcgacggcgctaaaagtgatgtcggtaatataactgatttatttgataaggataatgttgttttgattcctgatccggtctatcccgtatatgttgataccaacattatgaatggcagaaaaattgaatttttaaacgctaatgcaaacaatggtttttgtcctctgccggagggaaatacaaaggcggatattatttatttgtgctcgccaaataatcctacaggggcttgttataccaaagagcagcttaaaacgtgggtggactatgctcttgaaaacgatgcggttattttatatgacgctgcgtatgagatttttgttcaggatgaaaatctgccaagaagcatatatgaaattgacggagcaaaaagatgtgcaatagagttctgttcactttcaaagacagccggatttaccggtactagatgcggatatactatagttccgaaggatttaaaggttaaggtaaataagctgaagctcttaaagattgacagtgatgttgttgagattaacaagctgtgggtaagacgtcagaccactaagttcaacggcgttccatacattgttcaaagaggtgcggaggccgttttcactgaagaaggtcagaagcagataatggaaaatataaattattaccgtgcgaacgcaaaagttatagctgatactatggatgagataggtataaagtattttggcggtgtgaattcgccgtatatttggctgaagtgtcctaacggaatgaagtcatgggaattctttgattatctgctggagaatataaacgttgtgggaactcccggcgcaggttttggagaaaatggagaggggtatttccgtttgacagcgtttggggataaagataatacagttgaagctatgaaccgcttaaaaaagctttttggttttgagcatcagactgagcctgaacaagaggcagaagagacaaaagaagattcagaataattttatcacatagaatttgaaatcacttcatatatattatggagtgattttttattataggcggtgatggaatgaaattcagcgatatgcgttctaaagaagtaatttgtgcaatggatggtgaaagactgggttttgtgtctgatgtggaatttgatgaaaacagcggtcagataaagtctcttctggttccgggctcatacaggttcctgggtgttttgggcagagaagacgacgttactattccatgggataagataacaaaaattggcgacgacttaattataattgagagagactgaagaatgaattaaatgtcgaaatttttgtcattaaactttttgcattaaggtatatattacgatataatttttatagccgaatatagcaaatgttacaaaagaaaggatgacaaaaatgttattagactatttaaaacgaggcgtcgaaacagaagcctctcaggaaaacgaagtgcatgaaattgatagagtaaatatggagattaatttgacggacgtaactcagaataagaggataaaaacacatgggaactcgcaatccataccaataaacagcataaaaccaaaccccaatcagccgcggttggaaattgatgaaaactcattaaacgagctggccgcgtcaatagaaaattatggtttaatgcagccgataactgtaagacaggttataccgtttgagtatgaactggttgcggggcagcgccggcttgaagcgtgcaagcttttgggaatggattacatacaggcaatagttatgagggttgatgagactgacagcgcaattttggcactggttgagaatatacagcgtgagaacctaaattatattgaggaggcggaagcatatttaactctgatttcagagcatggaatgacccaggacgagctcgccactaagctcgggaagaatcagtcgacagtggcaaacaaaatccgtattttaaaactgccgataaaagtcagagctgtattgtgtgaatatggattaactgaacgtcatgcccgagcgcttttaaagcttgaaaatgaggaacagcagatggcggctttgaatgaaataactaaaaaaggacttaatgtagcaaaaacagaagctttagtagaaaaaatactaaaaaagtctcaggaaaataataatgaagaagagaaaaagccggggcaccttcctcaaactttcagagatataagaattttttctaacactataagaaaagctgttgaccttatgaaacagagcggtgtaaacgcggtaaccaagcggcgtgagagtgaggaatatatagaatataccattaaaattcccaaataatatagaatgttaactgtcgtaaaatattcattttattccttgcatatcaaatgaaactatgataaaattggaatgaaactaaagagacgctgagaaagcggcgtatttttataaatggaggaatagaaatggatattgaaattagaaacccgtggcatcctgatgatgcaaaacattacactactgacagaatgagaaatgattttttgattcaggacttgtttattcctgataaagtgaagctggtttacagccatgttgacagaataattgtcggcggagtatgtccgtcagaaaaggttctgactttggaagcaggacacgagctgggcgtggattactttcttgagagaagagagcttggagttatcaacatcggaggcccgggaacagttattctagacggcgaagaatatgatttgtactataaggatggtttatatgcaggaatgggaattaaagaagtatcatttaagagtgacgaccctgcgaatccggcaaagttttatttgaactcggctccggctcaccatacatacccaacattgaagattacaatggaaatggcaaataaacgtcccttgggaagcgttgaaggatgtaataagagagttataaaccaatatattcatcctgaagtttgtcagagctgccagctggtaatgggaatgacctcgcttgaggtagggagcaactggaatactatgccgtgccatactcatgagagaagaatggaagtgtatctgtattttgaattgggagaagatgatgttgtattccatatgatgggcgaacctcaggaaacaagacatctcgttatgagaaatgaggaagctgtgatttcaccaagctggtcaatacattcaggtgttggaaccaaaaattatacgttcatttggggtatggtaggagaaaatcaaacctttgatgatatggatgatgttgatatgaaagacataagataataaattataaaaagtcagcccgttttatactggactgacttttttgttctaaattaattacttttttctataaattctttatgatattgctgcagaacttccagagtgattttggctgacatatttacaattgtttcagacaattctccaatagccccggcaggaaattctatattattataatgttcagttaccgcctctttaaaatcttcaaaatttttgtgtgccataagtatctctccagtcatttttttctttaaattataacatataagtgattgcagaacaataaaatatatcaaaatatttgtgttttattatgctatcttatgtaaagcatgtattgactaggtcgaatattgtgttataatttaataaacataaaaagaaagaggtatttatatgatttgtcaattttgcggaaagcaagtaggcgacaatgataagatatgcaagtattgcggcagctctttggtgcggccggcggtaaacaataattatgatgtgaagcatgataataacgttaaaaatattgaaacgtctgaaactgagacatataaaccggtacaaagtgcaggtagaacaaacagaagacctgtcaatacaaatttagagaataatgctgatatgactgtagccattcccaaaattgacggcagggggagcggctttgaaaacagccgggcggcagaggagacaggaatttccggcaatgaacatcaagggggccgaaacaggagacagtctcagcctgtcaaaaagcaatattatcgatataacccggatcagaaaacgaaaaagaatacgcgcagacaggatcagcagttctatgctgataataattatgaaggtaaaagagttaagaagccttctgtaaaaagacatccgggaaaatttataataaaagttgccggtcttgcaataatagggtttattatagggttattgatatacatagtttcagcaaacgcttcaaattggtttaaaacaaggagtaattcggctgatattccagtgtcggcacccgctgcaactgtaaaaccgaaaagcagtaatggggctgcctcagatacaaaatcgagcggtgataagtcatcggccggaaatgacaaggaaaacaccgataaaaaaacacaatccggttcagactcaaaaccgaaagatactacacaggaaaagtctacgcaaagaactgacaccgaaaaaaagactgataacagggaagaaaagaaaactcaacctgcagacagcggagaagaagacacgaaaaaggcggaggagcctgtagaagataacattgacgatgccaaaacaggcgacgaagcaaaaagtgacaccggcaatgaagaaagcgctgagaatgctgaatcgggtttagaggattaaaataataaattaatagtttaatagttataactgcatatttaagtaatagtgctaagtgtttgtcagtcggatgttataacaataaataacattgaccataaaaaagtatttaagccgggcatattaaatgacttgaatattaattgtctaaattattagcgttacataaattggatttgatacattgatgactggagtttctcagagacctcagcgacagcggttggagaattggttattcggagaactacgatgatgtgataaaagatagtttaagtttttaagcaaacaaaataggatatgcaaccaaaattgcatatcctattttttaaagtaatattagcgggacattataaatagaaaactatatacaaacaaaataaccaaagcagaagtaaataatgggtaaagaatttgtgaaaagtaaagtgaaaaaatatattgacaagaagggtaagaatatgataagataataaagctttcggctgaggcaagaaaagctgaaagatagaatactgtgagagtaaaaaaggaaccggagaaggcaaaaaagtccggctgaaacttaagggacaaaaaagaacagaaaaaaataaaaaaagttcaaaaaaagtcttgacaagtaaaaacaaacatggtatactaataaagttgctgcggtgcagcgatgaagttttctgacaaagagatttgtttgagagctaagcagatgtttgaaaaataaatagtgaaaaagcggtaataaagatacatttagatgtacttattacgacaattgcacaaggtaagaaactcgcaagagtggagactttgtcaattccaaaaaagttttagcgaactttacaagcagagagatctgcaaacgttagtgattgaaaagagctaacaaacaatcgagtatattggaaggcgaaagcctggatatataacaataataatcgagagtttgatcctggctcaggacgaacgctggcggcgtgcctaacacatgcaagtcgagcgagaaatttttaacggattccttcggggagaagataaggatggaaagcggcggacgggtgagtaacgcgtgagtaacctgcctttaggagggggacaacattccgaaagggatgctaataccgcataaaattattgtatcgcatggtatgataatcaaagatttatcgcctaaagatggactcgcgtccgattagctagttggtggggtaaaagcctaccaaggcgacgatcggtagccgaactgagaggttgatcggccacattgggactgagacacggcccagactcctacgggaggcagcagtgggggatattgcgcaatgggggaaaccctgacgcagcaacgccgcgtgaaggaagaaggccttcgggttgtaaacttctttaagtgtggaagataatgacggtacacacagaataagccacggctaactacgtgccagcagccgcggtaatacgtaggtggcaagcgttgtccggatttactgggtgtaaagggcgtgtaggcgggtagacaagtcagatgtgaaataccggggctcaactccggggctgcatttgaaactgtatatcttgagtgtcggagaggaaagcggaattcctagtgtagcggtgaaatgcgtagatattaggaggaacaccagtggcgaaggcggctttctggacgataactgacgctgaggcgcgaaagcgtggggagcaaacaggattagataccctggtagtccacgccgtaaacgatggatactaggtgtaggaggtatcgaccccttctgtgccgcagttaacacaataagtatcccacctggggagtacggtcgcaagattgaaactcaaaggaattgacgggggcccgcacaagcagtggagtatgtggtttaattcgaagcaacgcgaagaaccttaccaggacttgacatcccacgcatagcctagagataggtgaagtcctacgggacgtggagacaggtggtgcatggttgtcgtcagctcgtgtcgtgagatgttgggttaagtcccgcaacgagcgcaacccttactgtcagttaccatcattaagttggggactctggcaggactgccggtgacaaatcggaggaaggtggggacgacgtcaaatcatcatgccccttatgtcctgggctacacacgtactacaatggctgtaaacagagtgaagcaaagcagtgatgtggagcaaaacacaaaaagcagtctcagttcagattgtaggctgaaactcgcctatatgaagtcggaattgctagtaatcgcagatcagcatgctgcggtgaatacgttcccgggccttgtacacaccgcccgtcacaccatgagagtcgataacacccgaagcctgtagcttaaccttagggagagcgcagtcgaaggtgggattgataattagggtgaagtcgtaacaaggtagccgtatcggaaggtgcggctggatcacctcctttctaaggagaccccttggttctgagaagagtaacggaagcggagagcggaagtaagagagtaaggcattgagcctgaaaattatggaagaaggaagcggaaggaagtaacggaagttagccaagaaatcctaaggtcgatgattgaggaaactcaatctcaaaagactttttcactatttgtttttcaaccatctgagaagataggttgagaagatgtttgaaaattgaataaagagaagagtaaggagtaatgattagaaataattatgaaagatactttgacgcaatatatgatacaggtcatatattgtggaaaaatgatgagtatttatgaaaatagatacaagatcaggttttttcagaaagaacgcgcgtatgaagagattcatacaagggtaactgggaatgcagcgactagagataggagctgtaaaaaaactattctaagaaagtattaacaaaacttactcacatgattaaaattaatcgaaagattaatcgctaaggagaactaaatagcgaccgtgaaatagtaatatttcactacaagagttgtgaacagagcaaaaagagcagaagggctttaaaaagcaaattaaaagtttacttttaatttgagaggaggagtcccgaagcgatgagactttatgagaattcataaagtcgataagcgaagggaacgacgacgaggtcaagcgaagaagagcacatggagaatgccttggcattaggagccgaagaaggacgtgacaagctgcgataagctgcgggaaggtgcaaatgactatagatccgcagatttccgaatggggaaacccggcaaagcaatactttgtcagcatatactgaataaataggtatatgtggggagacccgctgaactgaaacatctaagtaggcggaggaagagaaatcaaaagagattttctgagtagcggcgagcgaaagggaaagaggccaaaccgatggtagtaatactgtcggggttgaggactgcgaaacgcattcggagttgatagtagaattgactgggaagtcaagccaaagagggtaagagccccgtaaacgaaattgacgaagagcgagcaggatccagagtactgccggacacgagaaacccggtgggaagcagggtagaccactatccaagcctaaatactacctaatgaccgatagagaagcagtaccgtgagggaaaggtgaaaagaaccccgggaggggagtgaaagagaacctgaaaccgtgtgcttacaagcagtcggagcacgttaaagtgtgacggcgtactttttgtagaacggtccggcgagtgtatgtatgtagcaaggttaagagcttaaggttcgaagccgcagggagaccgagtctgaatagggcgaaagagttgcatgtatacgacccgaaaccgagtgacctacccatggacaggttgaagctagagtaaaatctggtggaggaccgaacccacgtatgttgaaaaatgcggggatgagctgtgggtagcggagaaattccaatcgaactcggatatagctggttctccccgaaatagctttagggctagcctcggattagtttagcggaggtaaagcactgaatgggctagggggcgtatagcttactgaaccctatcaaactcagaatgccgcaaaaatgatgtccgggagtcagactacgggagataagtttcgtggtcgaaagggaaacagcccagacccacagctaaggtcccaaaataggtttaagtggaaaaggatgtctagttgcagagacaactaggacgttggcttagaagcagccatacatttaaagagtgcgtaatagctcactagtcgagtgaataggcgccgaaaatttaacggggctaaaacctataccgaagcttgggaatttgcataactattagaacacatatgagaaagagaaagaaaaccggctgcgaagcagacgggaaattgaagtaaggaaaaaaggaatgtgtgatctaatagttatgcaagttggtaggggagcattctattatagggagaagcatgaccggaaggacatgtggacgagatagaagagagaatgccggaatgagtagcgagaattatgtgagaatcataatggtcgaaaacctaaggtttcttgaggaaggttcgtccgctcaaggtaagccgggagctaaggcgaggccgaaaggcgtagtcgatgcacatacggtagaaattccgtagccaccgaaattgttaagcacagggacgcaggaacataatccaaccgcaccgatggtcgagtgcggcgaaagggagcgaaaattaagtagcgaagtggatgattgtacactgacgagaaaagctgtgtgtattgatgaggtgcccgtaccgtaaaccgacacaggtgggtgaggagagaatcctaagaccagcgggagaagtgttgttaaggaactcggcaaattgaccccgtaacttcgggaaaaggggtgcctgctagcgcaggccgcagagaataggcccaagcgactgtttagcaaaaacacaggtctctgctaaatcgaaagatgaagtataggggctgacgcctgcccggtgccggaaggttaagaggaggacttagcgcaagcgaaggtctgaattgaagccccggtaaacggcggccgtaactataacggtcctaaggtagcgaaattccttgtcaggtaagttctgacccgcacgaatggcgtaacgatttgggcactgtctcaacaacacacccggtgaaattgtagtaccggtgaagatgccggttacccgcgactagacggaaagaccccatggagctttactgtaacttgatattggattttggtattgcatgtacaggataggtgggagacagagaagcacagacgccagtttgtgtggagtcaatgttgggataccactcttgtgatactggaattctaacctgcggccgtgaaaccggtcgggggacaatgtctggtggacagtttgactggggcggtcgcctcctaaagagtaacggaggcgttcaaaggttagctcagtacggtcagaaatcgtacgaagagtgcaaacgcaaaagcaagcctaactgcgagacgaacaggtcgagcagtaacgaaagttggagttagtgatccggcggtaagagagtggaattgccgtcgctcaacggataaaagctaccctggggataacaggctgatctcccccaagagtccatatcgacggggaggtttggcacctcgatgtcggctcatcgcatcctggagctggagtcggttccaagggttgggctgttcgcccattaaagcggtacgcgagctgggttcagaacgtcgcgagacagttcggtccctatctgtcgcgggcgcaggaaatttgaagggagctgtccttagtacgagaggaccgggatggacgtaccactggtgtaccagttgtcttgccaaaggcacggctgggtagctaagtacggaaggaataaacgctgaaggcatctaagcgtgaagtcccccctaagataagatttcccattctttaaaagaagtaagaccccacgtagactatgtggttgataggtcggaggtgtaagtgtggtaacacattaagctgaccgatactaataggtcgagggcttgacctaaaagacataggaagtataaggcgagagttttatgaactatgttgtgagtaagaaaacttcttactttctcttttcaattgaaaaacataatatattagtttgtataacatacacttttaaaaaagtgtagtcgcatttggtggcaatagcgagaaggtcacacctgtacccataccgaacacagaagttaagcttctcagcgctgaaaatacttggtgggtgactgcccgggaacataagacgctgccaaaacaattttgcaaaagagcagatttttgtctgcccttttgcagattttaaatattcctctatagctcagctggtagagcatgcggctgttaaccgcagggtcgttggttcgagtccaactggaggagccatttggtcccgtggtcaagaggttaagacaccgccctttcacggcggtaacaggggttcaattcccctcgggatcaccatttagacatctgaacttataaagttcagatgtttttttattaccatttttatttagtcttcaacagctggttgtgtttacacagttctaataattcctgctcctcggcggaatggttatcttttttacagaaggagcatgttactgctgcatttattcagcggtgaggtggggatattatcttaacgtaagatatatcgttttcgctttacgttatgttataactgaaccaacttttatttgaattcatctatataggaacggttttttttcttagctcaatataagtaatcaggcgaaataaagtcttaaattagattgagcttagcctgtactattttcggctggaattagttaattatataatttaaaaaattactcaattttagtcggtttgttttattgaggaaatatattatataaaaattatttataaatattattagtgatattatgaaaagtaaaaacacaataatattttattagattattttatcacagaacattaaaacattattgacagaacttaagacaggagttgtttaattatgtcttttgaaggatttgtttagttaagctgtaagctaaaaaaataagttattttaaagaaaaaatattatggaaaccaacaatagatattattagaaacagcactattgctttacatatcaattttatatgggagattttgaattaagtgtgtaagtaaaaatttaatttatattaaaagtttgtatttgttgtttagcattttggctaaaataagtagtctaatatatcaattaatcaaagttttaattctatagaattaataatattataatcaaacttaatttaaagtttatatatagtattttttatattacaaatttgatagttaaataaagtatataacaaaatataaattaattattttgtttattactaataatagtatatcagtttaatatgacaaattataaaaaataatatatagtggtttaaaataaaactagaagattatattatttctattgataatgcttgacaaaattgttgtaaaatagtattatttgtatgaagatattattcgttttatgtatgatatgagaattatatttgcattaagcaggaggtattaatatgaaatttggcgaaaaggtgaggaacctgcgtaaaaaaaataaaatgagtcagggtgaattggcggctgctattggcgtatctctgcgtactgttcagaactatgagaaatcgggtatgcatcccaaacagcgtgatttgtattataggttagccgaggttttgaatgtggatgtgaattacctgttgacagaggacgaggagattatttttgacgcttataaaaaaggcggcacaggttctatgagagatgttgaggggctaatagaaggcgtatgcggattgtttgccggtggaagtttgccgagggaggatatggacgctgctatgaaggctatttcggacgcatatttttccgttaaagatgaaaataaaaaatatacacctaaaaaatacataaaataatttttataaatatagtaggacaggaggttgaatagcttgacagctgaggatatctatttgaaaactaaaaagctgattcggtcttccggtagttctgacccatttgagattgccaagtatttaggaattatggtaagaacaagttcagatttttcaaaattgtgcggtatttatacaataattttacgtaagcgtgttataattttaaataataatttgtcaagagaaaagaagaggattgttttggctcatgaattagggcatgatatgcttcatagagacctggcggaaaacagaacgcttcaggagtttatgctgtatgatatgacggcaagacctgaatatgaggctaatatgtttgctgctgatttactaatttcggatgatgagattttggaacttgttaatatatacaattatgatgttaatcaaactgccaacgctcttgatacggacagtaatttggttggaattaaaattgaaagtatgaatcacagaggatataaatttaagagtgatatacaatttaaaaacaactttttgtaactgctttatttatatttttatttatctataatatcctgtttaacttcgaatataatatttgtactgatatttgtacgtaatttttattgtcgttttttataaatcttttcttagaaatagataatattatttttttataactgattaaaatcggttagttatgtaaaagtgcagttcatagtttattaatttaaggtaaaaagcaatgtttaatcttacaggatagtttttggttatttgagaacaaagattctgatacgataaaagtgtctatactttggggttcacttcaagtatggacatcttttatttatttagagtaaagtataatatcgatgatttttatattttgaatatgtaagaattaacagccaaagaattgaaattaacactttttgactaaaagtttacttgttttgactatcatttaatcagagtatttgataaaatatgttatgtaataataagaaaggtttattaatgttgatataaacagtatatcttgtctggattgataagagttatgactgttttacttatatatttggacaggtgttgattaaattatacccttctgaatgaagctgtttttgcctaagccgctctaactttggcatacagcttcaattcagcacctgtaaattaatttaaaacataataattatttattctgttttgcagacagatatattatttttatctatgatttgattatttgacaaattattaagacctttataactgataaataattaaaattatttatagatttcttcccaattaaaacccgtcaagacaatgttgtcttgacgggttttttatgtttaaaattatcaaacgtttgagttaatttgattgtagtagttattttataattatgaaatataattgcaatattgttattgacaagtgcattataattgcatataatgtatatgtgaaaattagttgcgtatttggttttttacagatgggaggatatgcggtaatgaaaagtgcaggtatgaaaatagacagaactaatgagaaaatcatattgcatagtgatatgaataatttttatgcttcggttgagtgtatgctaaatccgaatctgcgaaataaatatgtagctgtgtgcggcaggcagagcgatagacatggcatagttttggcaaaaaatgaaaaggcaaaatctatgggcgtcagcacgggggaacaaatttggaaagccaaacaaaagtgtccgaatttagtggttgttgaaccgcattttgaactttacatgaaatattctaaattagcgcatgaaatatattataagtatacggaccttattgaaccgtttggtcttgatgagtgctggcttgatgtaaccggcagcacgctgttgtttggaaacggttatgaaatagcttgtaaaatcaaagaggagataaaggagaatttgggtctgacagtatctataggagtctcattcagtaagatttttgcaaaacttggctctgatatgaaaaagcctgacgccgtcacttgcataacgagagaggggtataaggataaagtatggcctctgcctgcatcagaaatgttgggagtgggcagggcaactgcggataaattacttcatcacggagtaagtactataggtgatatagccaacgcaaatcctgatcatttaagaaattggctggggataaacggtgttaaactatggaattttgccaatggcagaggggggactcaaatagctccgtatgagtatataccgccggtaaagtcggttggaaacggtataacctgcgttgaggatttgaatgatgaaacagaggtatggaaagtaatatttgaattgagcagaaaggtatcaagacgtctgagaaaacaagggctgatgccggaagggcttgcggtcgccattaaagacaaagacctgcattatcaggaatttcaaatgaagatgccaaagccgtcatatagtgcgtttggacttgctgaaaaggcttttgagctttttaaacagcattatgaatggaaacaaagcgttagggctgtaacagttcgggctataaaccttgtgtctgaaaaagttgatgttcaattaaatatgtttgaagatataaataaggaattaaagcgggaaagcttagagcgttctattgaatatatcaaagatatgtatggagagaactccgttacttacggaagtttactgggagatataaaattgccggcggcacacaaaatcaatacggtgatgccgaatattatgtatcagtaatttgataagatttaaagattatcaaaaatacggatttccgatggaaaatccgtattttttattctttgtaaagttcgctgatattatttttatattcgcgtggcgtcacaccataaatttgtttaaaagccctattaaaggttcgctggctggtgaaaccggcacagccgcaaatgtttgtaatgctgtcgtcggttgtcctcatgagacttgccgcgtattctgttctgagcagcgccagatagtttctaaaactaatttttatacggtctgaaaagatatgtgagatgtaatatttactgacggaaaactcatctgccaatgtctcgatggaaatatcctgtttaaaatttatagtcatatattgtattattttttgggtaagactctcaacgggtatatgcttgccgtgttccaaacttatttttttcataatacctgacattataatcagcgaccaacccaacttttcggggaaagaggtgcagtcagcaatctgctgaaacgccagttttgttgtttcatcaacatcagtaataatcggatttttagggcgtacggaactcatatccgggaacattccgttaaacagcttgggactgcatataaccaacacctcatcagcaggtctgacttcattccgataatagtaatgcacaatatcgggaaatacaacagcggcctgtccggatttgatttcatattctataccgtcaatatctatatgttgaccttctttaaaaacgtatgcaatttcaatgtactcatgcagatgagcatgaaaacggatttcacggtaattgtgaattactgttaagtcagaaggctgtatttcataaaacggtaccatatcagttcctccatatccaaatagtaagcagcattttttgactacttttttatctttactggcttttattatatcttatattatgttagaatacaagtaaaatacagaatttgtttatagaaaatctttcatgtcctttagcaggataaaaaagtaaaatagaatcaatccaaatatttatctatatttaacggagagttttaaatgatttttacagttaaaatcttggtcgataaattgtctcatgcaaaaagatatattaataaatttgagttgataaaaatttaaacaagcttatcaaataactaataatttaagcagctgaagtttcatgaaatttacattaaatattgagtgatacagtagtttaatatttgtagagtttaattaataattttaacagaatgtattattgttaaattattcttgacaaaagttataaataggttatagttttgttatgtgacattttatggttacttttacggaattgcggttactattggctgataaagatatatttgagtaaaatcggaggaagagatatatgttaagaatggaaaaaaagttaaatggcagtgcagaaactaattcaaatttgaatgaaaatgaaattgatattttagggagtaaaaataaacttccgtatcaggattcacgtctgtcttttgaggagcgtgcggcggatttagtagctaggatgactttggaagaaaaagctgcgcaagtatcaaatatgtcagagcctataccgcgtcttggagtcagcgaatataactattggcgcgaggggctgcacggagttgcgagacagggaaaggccactagttttccaacaagtttggcgatgtctaatacctggaaccgcaagttaatttataaagctgcagatataacggcaacggaggcaagaggcaaaaatccaaagacaaatttgtcttactggagcccaaccattaatatggcaagagacccgcgttggggaagaaatgaagagacgtatggcgaagacccatatttgacggctcagtatggtatagaatttgttaatggaatgcagggagacgatacaagatatcttaaaacgatagccactataaaacattttattgcaaataactgtgaaaaggagcgccgaatgggctcgtcggttatggatgaaaaaacacttagggaatattacggtagagcctttcaggatattgttgaaaaagccgctccggcttcagtcatgagttcatataatgcaactacagtatacaggaacggagaaaagatttttgattatattccgtctactgcaaatccgtacatattacttgatttattaaggaaaaattgggggtttaacggttatgtcacaggggactgcggagcctttggagacttgaacaatacggcggcgtataaaaaagccctgtttactgatgaagatataaataacgttcctcagtatgcaacaataactaaggggtttttgaacggcgcggatacagactgcggcaatgccggcgttcaaaaaaatgttttagacgctgtaaaaaatggatatattactgaagacgatttggatataaatatttacagattgttccttcagagaatgcggacaggggagtttgattccggagtaaaatattttgaaatcaaaccggacgttttagaaacggcggaacatgtggctgttgcggaagaagcggcggagcagtcttgggtgcttttgaagaatgataataatattttgcctttgagtaatggaattaaaaatgctgcgctggtggggaatttggctgacgaagttgttttaggtgattattcagggtcgccggaacaaacagtcactccttataatggtattgtaacagaattaaggagggtaatgcctgatgttaatgtagattatcttggcggagctacagacgaaaccaaattaatgaatataagagggttgtcgtttatacttaaaagcggcgaagaacgaaagatagatttatctgctgccctggtttcaggcggtattacgcttaatggaagtttgattgaagatattacgagaaagggcaccgccgtgtttaaaaatatagatttcagtgatgttttaaaagttaaggcggaggtatcaaccggggacttagcgggaggaaaggtaaaattatgttatggcgatggaggaccgcaggtggccgaagttgtcagcgttaaaactaacagcttaaattcgtttaaagactgtataggcgaatataccggaacgtccggagggtattgcggaacggaagatttatatttatcttttgaggcaaaccaggaggaattctcggtaaccaaatataaggagaagctggactcggcggatgttataatcgcttatgcagggactaatctttcagattcggcagaatcgtatgaccgaaaaagcatagacttgcctttgagccagtcgcatgttcaggctttaacatcagcgtatccggaaaaaactatagtcgcaatgcaaacagtcgggcaagtaaatgttgaaccgtttgaaaaggacgcccgtgcaataatctggacttcatacaacggtcaaactcagggaaccgctctaggaaaaatattatcagggcaggttaatccgtcaggtaagcttactgccacttggtataaatctgaagatttggaacttatgccgattgaaacagaaggggtaaagggagaagacggtataacaagatattttaatgattataacatacaaagccgttcgggatttccggggcgtacatatcaatattacagcggtacgccggtttatccgtttgggttcggtttgagttacacggattttagatattcaaacataaaattatctgaaagatatgtaagtgctaatgaaaaaataaaaatttcggccgatatagagaatgttggtacagtatacggggttgaaatagttcagctttacgtttctgttccgggggctgacggagagaataagcctaaaaaacaattaaaaggatttgaaagaatagaactgctgcccggagagattaagagtgtttcgtttgagcttgatatttctgaaatgtcgtttttcagtgagaaggaacaaaaagcctatgtcttagagggaaagtataaggtgtatgttggcagaaattccgctgatgaatctttagcagacgagttcagtgtttccggagaacttgaaagcaagttgaaaaccgtatctgttctgcccagcggtatagcggtgcgcggattaataaacggacaaggcggagaacttgagcaaataagctctgtaacagctaatctgtctgttgttatgacagacgagaaaattttggatatatcaaaggcgaaagtttcttataaaagtggtaatgagacggtcgctgcagtggatgatagaggcgttgttaaatccggtcaggtttcaggagtcacaatgataacggccgaagttactgtgaataatgagaccaaatcggttgagttcccaatagtaaatatacttgaatataaggccggaactagtgataaaaataaagcggtacaagaattgacatacgaaaagaatttttatcctaaaggagcgttttcggataataattggaataagttagaagcgatatatgattccgctgtcaaagagatagaatcagcggtcaagtatacagatatgaccaagatattggctgaatcaattaagaaactgcgttcggcggaaatggataatattgaaaatcggtatacgatagcttctaaaaatcccaattatttggttgatggagtaatagattaccgcatgggcggaatacccccatatataacaagcaaagacggagtttcgggtacagtaaatactgaaaatccttataatggtattgaacttgaggcttatgacggcgataatagaattgatagcaaaaatttaatttggcagatagaaaaactggacagttcaaagcgtgattctgcagaaatcaacagaaatacaggagaactcacggtaatgaccggaggtcttgtgagagcgcgggttatagatatatcaagtttagttggcggagaaacgcttatatatattaatactcagattgaggctgaggacagtgacagtgaagaaaataatttcggcgaaaacagaagcggagccagcggctcagctcaaagggccaacagtaccggcaatacaagcgtgaactggctggagtataagggaataaggcttcaaaatctaaggaaaattactgtgaggtatgcgcttaaatccggaagcgtcaacataaaattcagcgttaatagaagtgcggctcccaactgtattttagcagagaatattttaaaagaaacaggcggaagtgagatttggaaggaagctgtatttaaagttaacagttcagtgttgtataatgcctctgtagacgggaacggactttcatctatatttctccaagctaattctgcaaatatagacttttttaagctggattatgaggaatatgacggaggtcttccatatagtattgctgaggttcatgaccgtgaaaacggtttgatgtcggttgatataaagtgtttgggcagcggtttcacttcgggcgttttgaaagtgtataccgttgaggaagtctcaaaggaaattaaatctattgaggtgacagcagggggcaggtatgatatctccacaaattgtaaatacggggattctgtgagtttttgcgtatataatatgaatgcagaagcgtctgatatatttaaccatacttacagaaaaccggcagaaaggaaagtaaaggtatacagcggtgataacagggcgtatacggtattgttctgcaatacacgaatggataaacttcctgagattgattgcattacaggatatggcacagttttaagaagagaaaaaaagaagtttacatatgtatatggcgacaaagaatacatcttttcaactgcctggcagataggcgacggaagcgaaaccgaaagctgcttgttatacagaccaaaagccgaatgttatattacggttctgtttgacggcaatgggggaagagacagggaactttatattgttcaaggagaaacaatattggctggcggaaaatcatatcctgaatgtaaatctgatgtaacggcaaaaatatctgatataactcagcctgtatacgtatatggcaacggcggaaataaaaatatttatgctgtttttgtagaatatataaacggaattgatgaaagtaaaacttttgagacaattcagagtgcaaagtggggaaacggttttgcaaaattggaaaaagaaagcgtcacgggaaaaaccaaattgtcttcaagcggctcaggttccgtatggtcggaagtaaagctggattattttgcgaaaagtgatgttgaagaaattcaaaacccgctgaaaataaatagtattgatgagtataaaggccgcttatatgccggctgcgacaatggaataatgttaatattgccgttgtgtcaaaaatgttatcagctgaaaaaagtttgcggttttgatattaaagatataaaaatagacggcggagtaatgaatataaccggcgatacagaaagtaagacaataaaaatggtatcgctgggatctgatagagttgaaccggaagaggcaatggtgctgcggtcaaacggagcagttttggcggacgttcgtgaagagtatgaatataaggaatcccatatccaaggagcggttaatattccattagacagtatagagagtttgttgacgtatggaagaaatacgataattatattttattgcctaaatgggtttaaagcagaattggctgtagaaaaggcaagagctatgggatttgaaaatgtgtataatttaggcggcgcagataagctgatataaataagatataaaacgcaattagttggttttatgaaataaaagtaattttatatcatttaaataaaagatcataaaatttaacttagtaaaagttgttatttatcttgcgcccgacttttacttgatattagaaaataataaattttggcaatattcaatatgtttgtaattttctgcatacaaaaacctcctatgacagtttcattgcattctgtcatagaaggttttttccatctatttttaattaattctgttttacccctgtctctttgttttattttaaatttttggaattttactctgcataatcagttgaagttttggtattaggaactgtgctgtcttgctgaatatttataagtttatcgtcaaatgttgttctaagttctgcgtttccgctaatataggctgatctgaggttgtatagagtgccgtcttttttaaattcgttaagtttctcatttatcagtctcagcaaatcagaatttccttttgaaaccgctatacaaaatttacgctgattaatatttgtctcttttatagtaaactttctattttgatttacaaaagtctcggcaattttgctgtcagtaaataatacatcggcggcgccgtttaaaactgccagttctgcctcggcctcgttcctatattctttaatatttgccaaaccaagattattagttaaataataacctgaatcgctgccggaaacaacagccacattttgtgcatttttaagactgtttatgttggtcacatcagtattgtctttatatgttataattgatgaactgagagtaatataagaatcagaaaaatcgactttttggtgtctttcgtcggttacttcaacagctgaaattaccatatcagatattccgcagttaagagaatcaagcagagaatttgatttcatattttgaaaaaccggtattctgttcattgattctgaaagtttgtatcctagtgccatatcaaatcctaaataattccctgaatcgtctatatattcaaatggttcatatccggcggtaaaagcaatccttattatagaattatctttaacagtcaaagctttactgtcgctgtttgaggagcgggctggctgtgtgcacgaagtaagaataaaagcatacattatggagagagcgcataagataattactgcgctcctgaaaactacgcttaaaactctgtttttattctttttcatcatccttaacacctcacagaaagccaaagtaaatatattttaattatatattatttaatattaataatcaagatgattattttattgagtttttaagacatgggtgtattagccgtatatcattaaatgttttgtaacaaatgtaatcaaataataattaatggaataaaatttgcataaaaaaccacaaaacgattggaactttgtgccaatttatgaacaggtgtattgtgtaaatttactaaatcactagtattttttttatatattattctagagatagaatattgactttttcgacgtttcgttgtataatgtatacacaaatccaagagatactgttactttggatattaacaaaagaattaaatattggcaaactatttgaaaaaataggtcgcaaagctttagagactaagttgaccattataagcaatatgcttttatggaagtttcaatatgtcagtcagctgcctcctacgcgagtacctgggcggtatttggccgcttttttcttaccctattatacacgctttttggtttaaaaattctaatgttttgaataattcgaattcagtgtgcaaaatatggattaatacacagttttgcgcagtgcgaacaagaaaagcgtttcgtgaaaagaagcggaaacaatagaaatatttttattctatagttttaaataataattgcaaaaaataaaataatataaattttttagagggatgtgtaaattaatgaaagtaaaaaagagagcagttcgttctactttggcttggattataacagtcgctatgatggcttctatgtttgtatctttgcctgtttttgcagacgaggagaagtcatatgattataacaacgttcagtcttcaaatgttacatcaaatggatattggactgacgtagataattatgatataagctggtatacaggaaacgaaaatagcggatcatatgatttaactgattctgccgatcttgcaggtcttgcttatttgataaataatcaaaatgtaagctttggcgggaaaactataaacttaacaggctctacatatgatatgtcagctcattattgggttcccatttccgcgtgttcaggagcaggtcctcataccggcggctcaaattgtactgcttggagcggaacttttgtgataaagggttcagaatcttcaacaataaccggtcttaatattattgacacagttgccccggcatcaaatgcggcaaattataattattacacagggtttattggacacatgaatggtgatgttgaaataagcaatatagtgtttgataattgtaatgtagaagataaaggaaatactgttgttcaggattacagcagcggcgctgccgttgtgatcggcgaagccagaggagacagcaaatttaataatgtaattgttcagaactctgttatttccggatgcacaaaggtcgcagcctttttaggactaaaaaatggttctaatggaggtcttacatttacagactgtgcgtcaaataataatacatttaaagcgctttattattataacgctatagttggtgttactatttcttcaactgctacagctgttgtttttgataatacttcttcggttaatgatacttttgaaaagtttgacccgaataatgaagctcaatattttggagacggcaattatattacttacaacggaattgagtatcttcctttagcacaaactatcggcggcgtaaaatatgacgacgctttggttgtgggaacaacaaaggctttggcagcagttttaggaactgaagctaaggaaattgttgttaacggaacaacttatcatgttggagaaactgcggtagacaatgttgctaagataaacagaaatggaaaagatgtatattacacatcattaaatgaagcgctgcagaatgctcaaaatggtgaaactatagttccggcaagtgagaatgttgtaataacaactgctgtaatagcagatttaaatgctgatatcacattgtcaggatttaattttggagacggcggttctcttatagttaagggagaacatgcgtttaaccttgaaaactgtaagtttgaagcaactataccatatagcgcagcatcaggagtcagaacacctgtaaagctgaataaccatggtaagacaacagttaaaaataatacgtttggaacagcaaacgatggagtatattacaatgctgtagaatttgatgtaggcagtgaaaccgctaaaaccggaattacagtggctgacggcactgaaatatccggaaacagttttggtaaaatatctaataattcaatcagtatttataatgttgatgagggagctactattactataaaaaataatgagtacaaagtagccgctaacgcattgagactaagcaatggattagttgataaagtaaacgctgtatttaatattgagaacgaatggtataaagcgactggtaccggagattatgctggctacgcattattccaacgctcatacggcggaacagttcagcaggatatgacaggttatgtgattaactttacagacctaaaatatggagcagataaaacaattgttacttcaaatgacccgcagcaatattatgtttgggacggaagcaaaattgtgaacgataataatgttcctaacgtaacgtttaatgattcaactccgactcagtcgcctgaaccaacggcagaacctgtagcaaagataaacagagagggaaaagatgtatattatcagtcccttaaagcagctatagaagatgcaaaggtaaacgagacaataactcctgcttcaggctcagttgtaataacaactgcagagaacgcagtccttgctaatgatataacagtatcagggtttaatttcggagacggtggagcgcttacagtgagcggaaacggagcatttacaattactgattgtaaatttgaagcaactgccgctggagtaaaaacaccattgaatcttaaaaattatggaaagactatagtaaagaacaacacatttggaactgaaaatgatggtgtttactataatgctgtagagtttgatgtaggcagtgaagtaaataaaaatggtgttaaagtagcggatggaacagaaatatccgggaatcattttggaaagataactcataatggaatcagtatatataatgttgaagagaatgctacgattactataaaggataatatatacgaaatatcagctagcgctttaaggcttagcaacggtttggttgataaagtaaatgcaatttttaacatagaaaatgagtggtataaggcaactgacccaacagaaggatgggaaggatatgcaactttacagaccgtgtataaaaatggtaatcctgaacaggatgttacaggatatgtgctgaactttaaaaacttatattatggcgacgagagtaataaaaaggtggcagaagacggagacggagtgcagcagattgttgtatggaatggaactgatttcgtaactgacgctgaaaaactaccaacagtatcaattacaaatgatgttttgtcgactcagtctcctgaaccaacagcaacaccagaggtgtcagcgacacctgaggcaacagcaacaacagagccgtcagcaacacctgaagcaacagcaacaccagaggtgtcagcgacaccggaagtgtcagcaacaccagaagtatcagcgacaccagaagtgtcagcaacaccggaagtatcagtgacaccggaagtgtcagcgacaccggaagtgtcagcaacaccggaagtgtcagcaacaccagaagtatcagcgacaccagaagtgtcagcgacaccggaagtgtcagcgacaccggaagtgtcagcgacaccggaagtgtcagcgacaccggaagtgtcagcgacaccggaagtgtcagcaacaccagaagtgtcagcaacaccggaagtatcagcaacacctgaagcaacagcaacaacagagccatcagcgacaccggaagcaacagcaacaacagagccatcagcgacacctgaggcaacagcaacaacagagccatcagcgacacctgaggcaacagcaacaacagagccatcagcgacacctgaggcaacagcaacaacagagccatcagcgacacctgaggcaacagcaacaacagagccatcagcgacacctgaggcaacagcaacaacagagccatcagcaacacctgaggcaacggcaacaacagagccatcagcgacacctgaggcaacagcgacagcaaaaccaacatcagcacctgttgtagtaccgaccccgtatccaacagcgacagtaaaaccaaacgcaccaactgcaacacctatgcctgagtatcaggttcagataagtgcgtcagaagagatttctgaagttttattggtaaataaggctaccggtgaaacaattgtattggatatggaagtttcagaagcaggtgaaattacatttgtgggttcagctccaaagggtaattatgaaatcgtggctaaagccgtaagcggtaaagaagttgacgtagctcaaagtgataattcattaaaggttaatgatgataaaacagaagctgtagttgtggctactgaggaaagcagcattgattatattgaaattaaaaatgctcctgatacggtttcatatacagaaggttcaacattcaatccggcaggtttagttattacggttcattataaagacggaacatcacaagatgtagcttatgatgaatctacaaagagcgggtttacatttaagccaggattagatgtttctcttccaagtgcggacgcttatgtcggcgatacctatgtaagagtgatttatggcaacaaatatgctgatcaaaatgtaacattcgttatgaacagtgctgagattaaaattacggcgccgaaatcaaatgctgcggcaacgtttgcagctgctgtagaagaaggttcatactattattcaggtattattacttggagtcctaatgtagaacaaggcggaaagtttgattatggtacagtatatacagcaacagtaacattggcggcaaaagacggatatagttttgctgacaatgcaaaagcattagttaacggtaatgaagcagaagttaatgagattagtccggacggaaaaactatgactgtttcatatacattcgataaaaccggttataaaaacagcggaaatagtggaaacagcggacacagtaccggaggaacttcaacacctaagccggctgagactgcaaatcctaatgtttcagcttcaccggagccgacaaagaacccgtcttcatggactaacccatttaatgatgttaacacatctgattggttctatgacggagttaagtatgtaaatgaaaacggtttgatgaatggtatcgaaacagatacattcggtccgtatgaaaacataactagaggaatgtttgtaacagtgctccacagaatggaaaatcagcctaagactgatatgacaaactttggatttacagatgttccggaaggatcttactatagagaagctattggctgggcgtctgcgaacggagtagtaaatggttatacagacacagagtttgctcccgaccaaattataactcgtgaacaaatggcggcaatgatttaccgttatgttgtttcaaagggtatgggtcctgtaggatcatggatgattaacttagattacaatgatgtaagcagtatttccgattacgcattcgaagcagtaacatataataagataatcggtataatgagcggagacgataacaataacttcaatccgcaaacggcagctaacagagccgagacgtcattggtattccaaagattagcgaattttataggtcagcaaaaagctgaataaaatactttagaaaataaagtgctgattattaaagccgttccaaattatttggaacggcttttagctttagattttatgtctatcgttttatataattatttattccgtcggcaatggcggaagccattttattttgccagagagggctgttaagattcagtgcttcagtcggatttgaaaggtatccgagttctaccagcacagccggcattcttgtgtttcgcagaactgagaagttggcttgccttacgccattatcttttactcctaaccgctgaacaactgagtcttgtatcgattgcgcaagctgggcggaacgagtgccaagcctgtatacataggtttcaaagccgtttactgccggatccagcgagctattggtgtgaatgctgataaaataatcagcgccccaatcattagctgtttgtgcacgttttcttaaatcagcagctatgggtgttataacattttcatcatttgtggttctgtattctctaacatcatatcccatgtttctaagattgttagctaaagcggttgcaacagcaagattgacatttgcttcaatcactccgttgccaacggcgccgggatttgttcctccatgtccggcgtctacaaatatttttgttgccatatgaattcctcctaaatataaatcagaaattgtgccggaacaatatctctcacttcattatattaatatgtatgaatttggtgaaacatgaaaaaatatatcaaaccgtgtcatctgcaaatttttagtgtttatttgatttttaaagcaagcgtaatcaatacgtaatatttttgtgttacaatatatgtgacgatggtatagagccggcgttttttgtgcgtcttgtatcagtgtctgtttacagatacaagatatagcgctatcaatgcgattgagggatttatctatgcaaaagatataaatcttatagtgtttgacagggctttttgtcaaattcttttaaaaacatagatatgctcttgccaaaaaatttatttgtgttataatatttgttggtttataaattttttataaatagaaacgtgaatatttgcagcttcggtttacataattaatgctatttatttgggggcattttataatgaataatgaagagaaaatggtaattttaggcggtgttaaactgcatggcgaagttaagataagcggtgctaaaaactctgctgttgccattcttgtcgcgtctatattagtaaagggaaagtgtgttatagaaaacgttccccatgtaagtgatattcttgatttgattgacataataaacggattgggcggtgtggctgaatttgtcggagaggatacggttgaggttgactgttctgatttgacggattatgttgcgtcatatgacagcgtaagaaagatacgtgcgtcgtcgtaccttatgggtgctctgctgggcaggcttaaaaaggctagcgtagctttgccaggaggctgtgattttggagttcgcccgattgaccagcatattaaagggtttgaagcgcttggagcaaaagttgatatagagtatgggatggttaatataacggcagacgagcttgttggcgatacagtctatcttgacgtcgtatctgtaggcgccacaatcaatataatgctggcagccgcacttgctgacggaattactgttatagacagtgccgctaaagagcctcatgtggttgatgtagctaactttttgaactctatgggggcgaatattaaaggcgcaggaactgatgttattaaaatcagaggcgttaaagaacttcacggcggaacattcagcgttatacctgaccagattgaggccggaacttttatgattgccgctgccgcaacccgcggggatgttatggttaccaatattattcctaagcatatggaatctctcagtgctaagctggaagaaatgggcgtgggcgtagaggagtatgacgaggcgataaggatttatgtagacaagccggaactaaagcgcgctaatgtaaaaacacagccgtatccaggtttcccaaccgacttgcagcctcagatgcttaccttgctgactgtggcaaaaggaacaagcataatgaaagaaaacgtttgggataatcgctttaaatatattgatgaacttaatagaatgggcgctaatgtaaatgttgaaggcaaggatgttgccgttgttgagggcggaagccgtttgacaggcgcgcctgtgtgcgcaacggacctgagagccggcgcagctatggtaatcgccgcattgatagcagacggagttactgagatttataatcttcagtatattgacaggggttatgaaaacctggaagaaaagctgagagcgcttggggcgcagataacacgccgaaatgttaaccctatgcccggagttctgagtgctgtaaacgtataaattgtgatagatattggggattgattgcggtgcgccgcgccaatcctttttatttagaagactaaatatggtgattttatgaaaatacattctttaaaaagcgggagcaaaggcaatgccagtcttgtatatacagacaaaactaaaatattagttgactgcggtataagcggaaaagctgtaaaaaccgctatggctgatattggctttgagcccggggatcttgacggtatagttgtcacacatgagcatgctgaccatattaagggaataggcgttatgatgagacggtataacgtcccggtatatgcgaactcaatgacctggtccgcaatcatgactaatgatttaggaaagcttaatgatgataaaataaagatttttgagggagttgagccattttctattggagatatcggtataaagccgtttccgattcctcatgacgcagcatacccggttggttattgttttgatgacggaaggtgccgggcggcggtggctaccgatatggggtttctgactgaagaggtgtttcgtgagattggcggctgtaaaacggttttgttagaatccaaccatgatatagggatgcttgaggtgggaccttatccatatcctctgaagcaaagaattttaggtaagctgggtcatctatcgaatgatgacgcggctaaggcaactgagtttcttgtaagaatgggagccgaaaaaataattttgggccatttaagtgaagaaaataattatcctaagctagcgtatgaaactgtaaaatttggaatatcaaaggcagatatagctgtaggccgtgatttagaacttttggttgctacataaaatagaatgatacaaaaattagtgccgagataattgaaccttaataaatatgaactttattaattgtattattattataaaaatatatacggcagtaattattacgttttaagcagacatactactgatatcgtttaaaaaacggtgtcagtttttattttgccgaatttgtttgtaaagtaaccatatgtattcattagacttctcagttacataaatttactcaaataaacttattaataaagtttattttgtatttgtcaggaagatttattcaataaaatgtcttagaaattttaccgatttattttgactgcgttttattgaactgtgaattaggttaaagaataattacgttaacaacagaaatacatattattatgatgtctaaacttgacgataaaattttctgtattttatgttttttgtgtttattataatgtttgaaacaaaataaatttttttgctcttgtttaattagtatacaattatactggaacaatataagcggatttcaggttaaccggttgttttagagattaaaataactgtaatctttttataaaatgctttaatttgatatacacttaactttggaaaaattcttactattatatattttttctcaaaataaaaaactactatggcttactttaccataatagtttttaagattattacttgtttttattggtttgattaagaaactcagtgattttctatcaggaaaaatttaaagttataaaattaatataaaattttcaagtagttatattttataagattttttaaattctaaatgatatcactttttagtagttaatccgaaaggtaaaaaatgctataagttataaatagaactttatttattggtttattaggattttaagttattatatctaattactggaacgcctttgttcaattataagtattgaatattatctgtagaggtttaaagttattataacttattagttaaattatcattattatgtatgtatttacctgcattatatttacttctgatggtataagaccttccggtggaatcatgaatcacaaacattattttactatttgggtcaatagttttgttattgttgttatcatgccgtataaataattttttatcatagaaaaatattacattctcttccggctccaaaacataaggtgtttttacagaaactaatttgtcaaacagttcttttccaaatcctttagtcaataataatataaaactatcctttaattttatacctcaattatttatgacaatttttttgtttccaatattaaaatactcattgcaacatgtaattttatatatgctttgtaagtatgtattgaatagcggaacactccgtttgtattactgaaactgcatttcatagtagtgagcataaattccgttttgatccattaattccttaaatgtgcctcgttctgcaatccggttttcagcaataacatatatttcatcagcgttccgtattgtagacagcctgtgggcaattgtgatagttgtgcggtctttggcgagttcttcgagactttcctggatatatcgttcgctttcgttgtcaagggcgctggtggcttcatctaatatcagaatgggaggatttttcaaaaatactctcgctattgatatacgctgtttctgaccaccggaaagtctggttccgcgttcaccgataaatgtgtcatagccgtccggaagttcttctataaaatcatgtatattagcttttttcgcggcttctattatttcgtctgcagttgcgtcaggttttccgtaggagatgttttcccggatggttccgcaaaacagataaacatcctgctgcacaatgcctatttggcttctgagactttttagagttaggccgcgtacgtcgtgaccgtcaatagtaatacgtccgtccgttacgtcatagaatctcggaagcagagagcagatagtggtctttccgctgcctgacggcccgacaagagcaatagaacgtccggcggggattttgaatgaaagattggacaatacaagcgcgtcatcatcgctgtaatgaaacgacacattttcaaaggaaacatcaccattcacattttccaggactttcgcgccggggctgtcctttatgtcaggttcggtttcaacaacagacaaaaagcggcggaatcccgacagacctttctgtatcatctcggtgagttcaaccagtatctgtatagggctgataaatattccgatatataacgcatacattgcaaggtctcctgcctgcatttgtccgtgagcaattagatagccgccgaatacaagtgtgacaagatacatcatgccctgaaaaaataggttccagcccataaagtttcccatacagctataattattccttttggaaatcaagaaagcgtgattgcttttttgaaatttattgcgttcaacttcctcgttggcaaaagcctgaacaacccggattccggacaaggtatcctggaggctggcattgacatcgcctattttacggcggttctccataaatgttgcctgcattcgtttattttggctcatagagaaaagaaacatcagaaaaaccaacacaaccataggaatggcaagtttccagtttataataaacaaaaaggtaaaagaacctactatttttattaatgatataaacaggttttccgggccgtggtgtgcaaactcggcaatatcaaaaaggtcagagacgagtttgctcatcatttgaccggagttgttttggtcataatatgaaaatgaaagtttttcataatggtcaaaaagctgttgacgcatatcacgctccatatttgcgcccatcatatggccttggtagctgacatagtatttgcaaaggctttgaattatgtacattgtgagcagagccagcgctataggaattagggcgttaataatcgaagcagtgtcacgggtaaacaaggttcgtgtcaatgtgcgcaggatttgcggaaaggccaggtcaacggcgctgataacagttgcgcagatgaggtctaagaaaaacacggttttatatggaccatagtattttataaattttttaagagtgtgcatggtgggtatctcctttctgtttttgtttttattgattcaatcttgattataccgagtgttaatcggtttaatcctggatagatagttaactgagagttactcaacattatatacggattggcagataaagtcaaattataaaatagaataattaaagtaaaaattttattttgtttctatgatgtagaaaagatacatattctctagattaaaagatagttatataaagagtcgttataagagttaatagttttaatctatttaattactacttatatattaaataaatagcaataaaaataaacgagacaataatgtttttaataagatataaaaataataaaaaaagttatacccaaatttagtgttcaaaattaattcttcttttatttgtgggcattattttattagcctaatctcttagaaactttaataatttgttgataatgacccatatatcctgtacaaatatttttataagcaaataatacataagcagacaaagttaaaggatgtaagataaaaggcaggattatatacggtcgtgcaaaagtattagataaaaagttaactcaagctattttagatttttatttatataattaacaagagaaatactattaaataaattatgtcattctaaactataaggtatcatctcattttattgcggaggtatggcataatcacctggattctatattactttcaatacagccttagagatattataagaaataacaagaagcggtgatatttacggtgaatttaaagagtaaattatggtataagattataactaaatagcttatatgttcttatataaacgcatatataaaagaaattaccataaaaataaacttatgctgttttttattatttcttagatatatgtagttattatataataatcactttctaaacagcgtattgattagatttacaattaatctttctgcattaaaataaaaaatagccggagaacttctccggctatataatatttattcccaatataaaacagcatactgctttcttccgtccgaactgaacttagttccattgcttagcccaagcgccgcgcttccgccgccgtccagtgccaaacctcccacacatcctaaatcagataatacctgaccggcacgagccagcgtggtagatgagcttacgcacagcactatcttgcccatttccgggttgtagccaatataagttctattggtgtatctgtcaatatcaaatgctccgacaaaaccctcttctgaggacatgactttcggcagaacaccgcatccgctgaccgcaaacataacattgttctcagtcgttatgtcatagacctgctttacttcaacagaaccgtcatagtgtacaataagcgtggttaccggatagccgtgcgtcgcataattagagataatctgtccgtcgcttacaataatgccaaccgagtatgtgtttcctgttgcttcccagccgaagaatgaagaattgctgtagttagctttccctgagctttcggcggatttgttaacaatagcctcagctttgatattcagcgggtcaatgtacacaacatgaactccgccgacataactgtattgatagttttcgggagcatgactgattatattcacgcttccgttatatgacatatcagttgtataccacagtgaatccattaaggatttgaggggaacatacagcgtgccgtcatagtttatcagcggcgcgtcccagtactctgtgtatgcattgttgattatagccaaattgcttccaagcgctattctgatagaatactcgcctttaataatataggcagtgtataacgccgggtcataatagactttacactccataaaattctgcattgatgtcaaggccagcatcagcgtgtcgttggcataaagcatcggcgagtctaaatatttctcatggccgtttatataaagctggtttccgtttaaagtaatatcagctgtcgttccgctcggagtgtcagaggatatggttccgagctccgcgtttgaaaatgcggaaacgtcaatctgaaaatcataatcatattccgactctatcgcaaaagccggaacacagcccataatcataacgccggctgttagaaccgccgccagtttgggcttgaatatatcttttgccatttctcttattctgtcaaaaatcattataattccttccaaagttagttttgattgttacagaaatgttacatatctgttacaaaaaggaattatagcatggattaggataaaaatcaagcaaaaatattatttttgtagaatttgtattaatgaatatgggataaggataaaagtgtgtttaagttaccgataagttcgtccgcagtgaggggcataccgccctggagccacttggtaacaacgtttagacaggcgccggaataaaagcttgccaaaaattccggtttaacaggaatctcttcgccgttttcaacggctctgttcacaatttttaatattttttcttcaaacaaatcctgaatcctgtcgggaatagaatagtcgttgttcttttttagtatggaagcatatatatccttattgcttgcaacgtaatttataatatcacccacaactttttcgggatttactgctccgtcggttccgtgagcagaaaattccagtttgtcaagcgggatatgttcgtctatgctgtaggtcaaaagttcgtatttgtcgctgaaatgtgaataaaaggttgcgcggtgaaccattgccgcgtcacaaatatcacagaccgacactttgtcaaatggttttttcttaatcaattcaaaaagtgcgttagacagcagctttttggtcctcctaattctgaggtcctcctttttttgattctcctgcattattctcacctcaacaaaatatattcataaatgtactattacagcatacattatagaataaaaatagacacatgtcaagtaaataaataacatataattatagacacgattgtgtattttatacaaaaattaagttatacgacaaaaatgaaatatttgtctattgaataaagttcagaatggtattatacttactctgtgaaatagacgaagaagcgccggtatagcagtatgcaggcggcagaatataatattgttaagagtagatttgaatggagtgatactgtgaaaaattcagatgagaatataatggaaaaagtagcgctgtttatagtagacaaaagaaaagcattttatctgttgtttgctattgcttttgtgttctgcgcaatttgtattcctaaagttcaggttgaaaatgatatttcagcgtatttgcctgagtcgactgaaacaaagcaggggcttgatttgatggacagggaatttgttactcacgacactttttcactgatgatttcaaatattccttataaccaggcagaaaaaatgacagacaagattgaagaggtgggcggcgtaaaggaagttgagttcgacgacagcgaggaccattataaaaactcttcagctatatatacggtaactctggacagcggtcttgacaatgagcgtgagatagaaatagagaatgaggtaaaagataagtttgctgagtatgactgttatacatattctgcgtcgattgacaactcgtctgacagtttggcggcggacatgagacaaataataatgtatgtggctattattatagttttgatgctgctgtttacttctaaatcatttatggacgttgcagtatttttgatagtgtttatagttgctgctgttttaaatatgggaacaaactatctgctcggtaccatatcatttatatctaactcggtggcaatcgttcttcagcttgccctggcaatagattacgctattattttgtcacacaggtttgcggaagaaaagcagactaaaaattcacatgacgccatagtggcggcgctgtctaaagcgattatagaaatcagttccagcagtcttactactgtggcaggactggcggcgcttatgacgatgcagcttggtataggcaaagatttgggtcttgtgctctgtaagggaattatatgttctcttataacagtgttcctgcttatgcccggacttttgtatatgttttcaaacgttatagacaaaaccgttcataaaaattatgtgcctgatatatctttttggggaaagattgttatgaaaacaaggtctttcgttccaataatttttgcgttggtaatagtgtcttcaatatttctgtcgtctatgtgtcaatacgctttcgatcaggattctgtgtccagtccgaggctgagcgacagcaaaaaggcagagaacaaaataaaagaaaattttgacgtcggcggacagcttgcagtgatagtgccgaaagggagctatgataaggaaaagaaaatacttcaggatgttgaagaatacgacggcatttctactgcactgggattggcaaacgtagaggtagacgatgattattgcctgactgacaaggttactccgagacagtttgccgacctgatgagtttagatattgcaacttccagagttctgtttcaagcttacggcgcttcagtgtcgcagtataccccaatattccaggacgtggacagttataccgtgtctattatggatatactgatgtttgttcacgaacagatggactatggcgttatagatttgggtgaggaaaagaattcggacataaatgaggtttatgacaaggtgtcagacgccagagatcagcttgagggagaagagtattcaaggcttgtgtttacatataagggaaagaacgagagcgaggaagttatagctctgcacgataaagtgcgcgaggaagcaaagaggtattacgataatcctattcttgtcagcaacgctatttcagctcttgatttaaaatcgtcattcagcggcgataatcagaaaatcaacctttttacaattatttcagtgctgctgattctgctggcgaccttcaagtcttcatcagttccagttctgctggtgcttacaatacagggcagtatatggataaacttctcgttcccataccttatgaatgagaagctgtatttcctggggtacctggtggtaagctcaattcagatgggagcgactatagattatgctatagtgttcaccaacaggtatcttgaactaaagccggagattggtaaaaaagccgccgcaatagaagctataaacggcgcgttcccaacgattttgacatcgggattgataatgatgattgccggcttcctgatagggtttatttcaaccaacccggttatttcggctttgggaaaatgtttggggcgcggaacacttatctctataatcttggtaatgacgctgcttccgcaaatcatggtgctatttgataagctggtcgaaaagggcgcgtttacattaaaaaagaaagagaaaaaggaacgcaccggtatagtttatgttgacggaagagtaaaaggctatataaacggatacgtaaacggaacaattcacggaatggtaaagggcgatgttaaagcgatagttgagaatatgagcggtccggaagacgagcagaagcagtaaaatagtcaaaaagaggtgatttgtaatgaatagaatatcagaaaatcttcgcagggttcttgcgtttatggcggcgctggtcatccttgtttgctgtccggcagaatatatttgtttggcagagggagaaggaaccgccccggtaataaccatatcaacgccgggagattttgcggcgcttgctaaaaattgtgtgtatgacagctattcccgcggaatgcaggttactttgctgaatgatatagatatgtcaggaaccgagtttgagcctatgaaaatattctgcggcacattcgagggaggcggtcaccgtataaccaatatagatttaaactttgacggatctgcaaaaggactgtgtttcgaactcggcgagggaggagaaatacgcaacctcaatatttcgggtaaagtaaaagcgaaaaaggttactgacggagccgcgtctatcagcgacgttataggaagcgtggtaaagaatgccggaataagcacagacataataaacgagaattctatctcagttttgggaggaatagtcggcaaaaaccagggcagagtgataaattgttcctttgacggcgagattgagggagacgctatagttggaggaatagtcgggcagaatgaggagaacggatacattgaagcgtgttataatgtcagttctgttttgggaaacaaagacaccggcggagttgtcggaaagaattacggctgggtcaagtcatccaagaattccggcaaagtaaattcatctccggtggaggagagccataacattggcggaatttgcggaataaacgacggcgtgcttgaaaattgtttgaatgacgctgaaatcggatataaaaatgtagggataaatatcggcggaattgttggaaaccagtcgggctgtgttatagagtgtcagaatataggtgatatattcggatctaaaagcgtgggcggaattttcggcagatttgagccttacactgatataagcatagaagatttggacagagtaaaggacgatgtgaacgagattcgtgaaaacgtgaagagtgatattgacaacagctggaataataccattaacgatatagacagtctgcgagacaggttaaacactgatataaacggagttttggacagattcggattttttggcggcggcggacttctttcaaatcttttggggctgagcggaacaaagtcgtcattgtcaggagctttggacagtttgactagcagtcaaaccgggcttttggacgcgatacgtgacagaattagctcgtctgacagcggaagcctgacaggattgctggacagtctttcggattcggcaagagagataagtgatgacttgggagggctttctgagtcgggaagtttacttttggatcagcttaacgatgagactaaagggtcgttaggggaagcgctggattctattaataataccattgataccgccaaccgggcaggtgagagtttaaatgatgttctgcaggacgttgataatctgataaccgatgtaaatgacgcttacaacgacggagactggcagactttgagcgacaggcttgactctctggacggcaggctggattatattcaggatactatgctcgaccctatttcaagcagtataacttcatcgctgaacgctgttacgagaaccttaaactctataagaaatgactccaatgatattgcggacgccataagcggaccattaaagcaggcggagacaatattaaagaatgcgaaggcacagattgacgccgccaatgagcagattaccaaaatcagaacagatattaaacaggctattgaaaaggttaatgatatattaagcggactttttccgactgctaaaccgaaaacgataggaagcgttatatcggatactatattcatgacagcgtatgcggatgaaaaactggatttaaatgaggatgaaatcaaggatacattaaaaaatctgacgagcgtagatatcgacatatcaagaaatgtggcaggaatgaacaccgatgacgcccttgtgatgtactgcgtcaacagcggcgaagtgacaggtgaaaaagacttgggcggaataggcggaacgattggtatagagtcggcggttaagtacggaaataatgtaactcttcccagcggaaaaataattactccgacttctatagttaaagcagtggttaacggatgtataagcgagggagaagttttttcgagaaacggatacggaggcggagtggttggcgacgcgtcttttggaataataaaaaattctgtgactgaaaccaatataacttctgatgaggggggatatattggaggtattgcgggatattcaaaaggtaagatatataattgtgcggccatttcagatttaaagggcagcgaccatgtcggcggcatagccggagagggggataccatagcaacctgttacgctctgcctagaatagacggtgttgttgaaaagagcggcgcaataacaggaaccgcaggcggcgtggtacagaacaactattttataaaagagggactgagcggtattgacggcaccgattatgaaggaaaagccgtggctctggattatactgaaatgaccggagcggataatatcccagaaaagatgacaggattcagcaacgatacatggtatatggggagcggagatatatttcttccccaaaatagggtattaagtgataattcagcttcaaatataggcgctttgattaaatcgaaatcagccgaatatgcggcttttcattttaaagtgaaatttgatattgatgaggagacagtcaaagagtttacggtagactacaatactgttttaaactctgaagagatacccgatattgagccgcgcgacgggtattgcccgcagtgggataaggatacctcagaccccataagaagaaacactgtatttaaagctgagtatttggatgctgtaaagactttagggacggcggaagaaccgcctctgctgctcgttgaggggaattttaaagacggttcggaggttcacgcatgggaatcagacgcggacggggattattccggcgactataaggctgttgcggcatacgaatttgaaataaccccggaatacagcggtaaaataaaagtccatatccgtgataaggatgaggacggaaactgtataggaatagttataaacggcaagaccaaaatattagacgccgaaagggacggcagttatttggtgtttgagactgacagggcaggacagtttaccgtgcttcacaggcgcagcaatatttggaagattttggggatattattgctcgcatttggtcttttgatattaataggagtcacagcttataaaagaagcggcatggcaaaaacgaagccaaaagataaatcacccaatctaacagataatgacgctgaaaaaaataaaattgaagccgatagggatgctgaaaagctggcaaaggcaaaagccgatattaaagaacccaaacagcgggaacgtgatgagattagtacggctaaagaaaaatataaaaaaactgttgacaaataatgtgaaatggtatataatctcaaatatagtaatcattactattttatatctattcttgttgatgtaatgtatttttcaataaagatagcgcaaactaataatgtttgttggaaatttcagtatggcagagtgaaaaataattaattaatatataattttggaggtaagagaaatgaaatacgtatgcgatatatgcggatatatctatgatgaagctgaaggcgagccggataacggcatagctccgggaacaaagtgggaagaccttcctgaagattacgtatgtccgctttgcggagtcggcaaagaccaattcagcaaaatggattaataaaaacaaccgcttcacattttagtgaagcggttatttttatatataaagttgaataaatttatattttatatgtgtgataatataaagttataaagttatatcaaatagctaacgaaataattactgataagaataatacataaaaaataataagtatatataagcaaacagcttttagcgaacatcggcagggtgtgcgtaagcacacctcgttaggtgagctgccatctcacgcatagcgtgaacatacatatggtggattgtcataattctttttgattacaaatttctccgtgactgcgcgccttacgcggtaaactacgtttgtacatcacaactaagtttgattattgacattgtaggtttatcaatacaaagtaatttgtattacacacactttaaaaaaagtgtggtcacagccctgccgaagcttgctataccacagttttatataattagttattttagaattattaccctgcatctcacgcttttagtgaacatcggtagggcagacaacgtctgcctcgttaggtgagctgtcatctcacgcgaagcgtgaatatacatatggtggattgtcataatttttttgattacaaatttctccgtgactgcgcgccttacgcggcaaactacgtctgcctcgttaggtgagctgccatctcacgcgtagcgtgaacatatttaaaatagtttgttatacctcttctaatctttcagaaatgtatacaaaaaaccgcagtttttttctacattaaaagtggttgaaattgccatgaattagtagtataatgtctctatagtacaaattaaacaaatcggaggcgcaaaaaatggaatatttagatgaatatgcaagatggataaatgaagctgaccctgaaacggtggcagaacttgagagtattaaagatgatgacgcggaaataaaagaccgcttttataagacgctggagttcggaacagcaggacttagaggcgttttgggcgccggcataaacagaatgaacgaatatgttgttggccaggccacccagggattggcgaatcagctaataaaaacaaatggaaaggacgcagatttaagcgttgtaatcgcttatgacagccgtcataagtcagatgtgtttgccaaagaggcggcgcagatattggccgcaaatgggataaaggtgtatttgtttgaggagcttaagcccgttcctgagctgtcgttttcaataagatacttaaagaccacagcaggtatagctgtaacggccagtcataatccggcgaaatataacggatacaaggcttatggctcagacggcgcacagctgaatccggagcttgcaacaatcgtgcttgatgagataggaaagacggatatttttaccggcgttaaaaagatggattttgagcaggcaatagaccaaggcatgattgttatgattggcgacgaggttgaggaggcatatttggacgaagttcaaaagcagtgtgtgaatcctgagctcgctaaagaaaagggcgacaccctgaaatttgtttatactcctttccatggagcaggcaacaagcctgtcagaaagatattaaagcgtataggctttaacaatgtcgttgtggtgaaggagcaggagcttcctgatggcgatttccctacagtagaatccccgaaccctgaaaataaggaagggtttaagctggccatcggatatgctaaggaatgcggagcggatttaatagtgggaactgacccagacagcgacagagttggtattttggttaagaatgacaagggcgagtacgttacctttacaggaaaccaggttggaaccctgctttcggaatatattctttcggctcttgcagaaaaggatgcggttccaaaggacggatacatagtaaaaacaatagttaccactaatataattcaggctatttgcgacgcttacggcattgaaatgaaagaggtgctgaccggttttaagtttatcggcgagaagataaaggagtcggaagagaccggaataggaacgtacatttttggatttgaggagagctatggttatcttaaaggaacctacgcccgtgataaggacgcggttgttgcgacaatgctgattgctgaaatggcgctttattaccaggagaacggaacttctatatttgagcagatggacaacatctacaagaagtatggatactataaagaagaagttgtgtctgtaacgcttgagggaatagaggggcttgcaaagataaagtcaacaatggataggctgagagagaatccgccggagatggttgcaggcaaaaaggttattgctgtgagggattatcttacaagtgagagagttgataagctgacaggagaaaagagcgagatacttctgccaaagtctaatgttatttatcttgagcttgaagaccagaacaactttataattcgtccgtcgggaacagagccgaaaattaagctgtactgtttgatgaaaggcgagactgaggaggaggccaatgagcttcttaaattggtgaaagaggatatagacaggataatagaataattaaattgcgcggcaatataaaacagcaggttaatatggttgcctggcaattaaattttaaagtgtgaaaatttaaataaataagacaacggggccgatttttattgtgccccgttgttagttatggtaattattattttacttattaaaaaaactatttatatactatgtatatgaccccatataatatttattattttacttataataggtgtttgaatcatttaattattacactaaaaaagcggttctttcagtgaacttcggtaggaatgactacactttttttaaaagtgtgtgtgatacatactaacttgttttgtcattacctgcaatgtcattaatatgtatactcaatgcagatgaaatctgccgcgttaggtgagttatcatctgaacacacagtgttcaatatataattgtattattcaaattataaaggtttcttacacatgacatcatattaattttttattaatttacttaacgaaaaaactgtttatatactttgtatataaccccatataaaaaattttattattacataatagggtgtttgaaccatttctttttatttgagtatacataataatgacattgcaggttatggaaaaataagaacatatgtataacacacactttcaaggaaagtgtggtcacactcgcaagaaaaagaaacgcttcacctgtgcccccacctttcagactaactattaaaagtcaatagaaaaataaaaaaagttaaaatcttttcggtcaaataaggaaactagaaaattgtatgtcaaataaagcaatagtaaattgcttaaaaaaatagtattaaaaatacagtattacataaactcaaacggcttggtaactctgacccgttttctgtaaatgatagattactctcactagtttttttactgcatgagatattgcaacattgtaatgttttccctcagttcgcttttttgccagataattcttgaaggtttcatcccaatgacatacatattttgctgcattgtataatgcgtaccgaaggtaacgcgaacctcgtttctccatgtgtgaatagctattggttatttgtcctgactgatacgttgatggtgacattcctgaatacgcaagtattttatcaggagatgaaaacttactgaaatcacctatttctgctactatcatagctcccattgtgtaactgatacccgggatagacagaataggcgtgtttatgttatccataatatgcttgatttctgcttctatctcctcaatttctgctgtaagttcttgtattagctttatggtatgctttagctcaagagattttgctggcatgtctgaaccgattgagttttttgcggcttccctaaaaccaattgcagtatctttgccatatctgcctctagatgcagtatgcagcaggtttgtaagcttcgttaagtgggcttctgcaatatgatgggctgacgggaactctgaaagcatagtatagacagattttatatgcagcgaaggaacaagtttttcaagttccgggaaaagtatgttcacaagccgggaaacagtggttttgagttttgctctttcagaaactttataaaatctgtatctggttagtgactttaattcttcgttgtgatataatatatctgagtaggactttaagtctacattagacattaacatcatagcgattgtatgggcatcaattttatccgttttagtctttctgaggctgagagactttctgaagagattggtatgtaatggattgataacaaaggtagtcaaacctttatcaagaagataacccaaaagattgtatgagtaatgtcctgtggcttcaagccctacttttactttgttaaaatcttttgaaacagattcaattctttgataaagaaaattaaaaccttctatagtgttctgaatagtaaaagcattaaataaaacctcgccgtcagaattgcaaatgaagcagtcgtgcttgtcctttgcaacatcgataccaacaaaaatcatactaaaaactcctttgaaaaaatatttgatactgttccacagatactctttacgattgtaacctcgttctaaataaaccgtcgtgcggtatctaactaattaacaaatgtataaagagactgtggttagagccttcaagaaaccatcaagtggtaggtgggtgtaactaatccacagtatctaataacattatagcacatgcccttaaaatcgaacaatattaactactactttattatacgaggtgggtgtgatacaaagtgacttgttttgccattacctacaatgtcaataatatgtatactcaaaaaagaaaaagtactgctcgcttatgtcgcctaacggcttcaaggggcgctcgcaccccgctcatttcaccatgaagcatggcttcatgatgaaaaaagccctgtaactttcccgttgactttgtgaactgccgtgaatgaagatattccgagttcttatttatttacttatcaaaaaagccgaggtttcagtttaatttaacacaaaaagcagggttttcagtgaacatcggtaggcttgcggtagcaagcgcgttaggtgagcaaacatctgaacacgcagtgttcaatatacaatttatattttaggatatggaatcaatacattagtacggcctaatatatagtcagtaggtacgttataaaggtcagccaatttcaccaaatgtcttacaggaatatcctttttgccaagctcataacttgaatatacagtttgacttgttccaagaacttctgcaacatcaacttgtcttaaatcattatttttatttatatattttgtttaaaatctaacataagtgtttttttgtatatggggtcatatacaaagtatataaacagttttttagttaagtaaattaataaaaatttatatggtgtcatatgtaagaaacctttatatttgaataatacaattatatattgaacactatgtgttcagatgatagctcacctaacgaggtgtgcgtaagcacaccctgccgatgttcgctgaaccccaacttttttggtgaattaaattaatgggaactcggaacagctttttagtgaatcaaaataatcaaataaaatttgtattgtaatttataatataattctcgtattttcaagataagtgtgttacaattaacctatctacataaagtgggtgttaacacaacatataaataaaatatgagaacggagaaagagtatatgatgcgtgacgcagaaaaaactataggtaaccttattgataagcagggagtttcatatattgcgtctatttcagaagacggttttccaaatataaaggcaatgctggcgccccgcaagcggataggtatcaaggaattttattttactacgaatacttcttctatgagagcagcacaatatagaaaaaatccaaacgccagcatttatttttgtgataagcgctttttcagaggggttatgcttgtcggcagtatggaagttttagaagattctgagaataaagaaatgatttggagagaaggcgacactatgtattatcctttgggagtaactgacccggattattgcgtgcttaaatttgcggcaaccggcggacgttattattccaactttaaatcggaaacgtttgaaattaattgatttgtatatttaaaatctaaccggcgaaaattatagctgaaggaagctttgtgtttgtttaaacctatcggagaaatatttaaattataaacgaaaacagctgactgacaaaaagagttttatatattaaattcatatttaaggagcaaaataatggttaaggttagaaatgaaacagaaaaagattataaaatagtagaagaaatcaccagaaaggctttttataatttatatgttccgggctgtgctgaacattacctggttcatattatgcgccagcacaaagactttctgcctgagctggactttgttattgaacttgacggacatgttatcggaaatattatgtataccaaagccgaactagttgacgaaaatggagaaaaaaaggaaatactgactttcggcccggttagtatattgcctgaataccaaagaatgggatatggaaaaatactaatggaacattcgtttgaaagagcgtctgagcttggatacgatgttattgtaatattcggaaatccgggcaattatgtagcccgtggatttaaaagctgtaaaaaatataacgtctgtcttgaagacgggacatttccatcagcaatgctggtgaaagaattgaagcccggtgctttggatggaagaaaatggatttatcatgacagcgaagttatgcagcttgatgagaaggaagctcagctctttgacgacggactggaaaaaatggagaagaagtatcagccaagccaggaagaattttatattcacagccgttcttttataaagtagtctttttaaagcggattagatgatatataaataaaaaatagaagcggcatatcaccttgaatggtatacctcttctatttttttgttattgattaaattccccagctcataatccatagcgctatattaaagaagataataacagagcatgtgtctacaattgtggtaataagaggcgacgccataagagcagggtcaagcttgcacagcttggcgagtatggggagcactcctccaagcatcttagctattactaccgttgctatcaaacttaatcctgtgactgccgaaaggaacagcgggtcctgaccgctgtacataatatatattctaagagtgttgactgctgcaagaataagcccgacaactactgctattcttatttctttaaacattattttcataatatcttttggggttatttcgtcaagcgccaaaccgcgtattatcattgtggagctttgcgctccgcagtttcctccggtgtccataagcattggtatgaatgcgacaagtatcggaagcgctgtaaaagccgcctcataattttcaattatgcttccggttattgtggccgagagcattaggagaagcagccaaactattctgtttttggcgtgtctccaaacaggcgtcttaagatatgtttcctcaatcggctgcaaggcacccatcttttgaatatcctcagtgttctcttcctggataacgtcgatagcgtcatcgaatgttacaataccaaccagccggttttctttatcaacaaccggcagagacataaaatcgtacttgtcgaacatgttggcaacttcttctttatcgtcaagggtttcaacactgattatatttttctccatgatagtgttgataaccgtattatacggtgacagcaaaagctctttaaccgtgaccaaaccaataagtttgcggtcggtgtcagtaacgtagcatgtgtaaatcgtctctttgtctactcctgtgcggcgtattctgtcaaatgcttcagaaacagtcatgtcttttttcaggctgacatattctgtggtcattatactgccggcgctgtcttttggataccggagtatctcattaatgctgttacgcatttcagagtccgtatgtctgagtatacgctttaccacgtttgccggcatttcttcaatgatgtcaacagcgtcgtcgacaaaaagttcttcaacgacgtcgtgaagttcccgctcactgaatgcgtttatcagaagctcctgctcgtcgctgtccatttcaacaaaggtttcagctgccagctcttttgggagtattctaaataatatagggaggcgctgttcatcaatctcgccgagcagttcggcaatatcggcaggctccatagcagtaaacaagactcgtattcgtccaaattccctgctgtctaaaagctcgttcacattgtttctcatttcgtccaaattaatctgttctgccatatgaagcacctctctttccgggtctcaaaatctatcattccgtgcaggcaaagctgtctgtcattttgcaaaaaacaattataacataactcgccggtcagttcaaggtaaaatcaaccaaagatttacgcagaaatatgacttattattaatctgagtctttttttaaattattatacagttttgtgataacagaggcgtatagccgtttaaaaaagccattgtgactgtcctgcgctgagttatacggctgaagagatacaatgctctgccgattaattttttcagagatagcttcccggagtaaaacctcctgacagttaattttgctctgaacattaggtttcatatcataagtcccgtcgttttgcagaacacgggctttgaccgtgtcgctgagacatatgcggatatagtggtttattgcgtcttttatatcttgtgaatatatggggcagccaacctcaactcggttatccatatttcttgtcattatatccgctgacgcaataaacaatttttgttcctcaccttttccaaagctgtatatgcgtgagtgttcaaggaatctcccgacaatactataaactttaatgttttcggtaagccccggaatcccaggcagtatacagcagattccgcgcaccagcatagtgatatctaccccggccttactcgcctcctgaagtttgcagattatttccttatctgtcacagagttgacctttataaatatctgaccgtcttttccctttttcatctcattgtctatatagctaattatacggtctttcattgcgttgggagcaacccacaaatgcttatattcgccgtcaagattagaaatggatatattattaaaaaagtttacagcgtcttcgccaatttcatggttttcggttataaatgaaaaatcggtatacagtttggctgttttttcgttgtagtttccggttcctatctgtgtgatatatttcatttctccgtttacatttttggttataaggcaaacttttgaatgaattttatagtcgtctaatccatagatgatattacaaccggcctgttccagccgttctgaccaatcaatattgttttgctcgtcaaatctggcgcgaagctcaataatgactaagacttctttgccgttttccgcggcggtacataaatgttctataagtttggcgtttttagccaaacggtatatggttatttttatagacacaacctgagggtcagccgccgaccttttaatcaaatcaacaaacgggtccatgctctcgtatgggtatgacagaataatgtcgtcgttgcgttttccgctcataatattcgtatgggttatctgcggttcaaaatcaggatagcataagctgtcgttctgatcctgattaaacttgctctgaagcccaaaaacatagccgagagacaacggggattttgtggcgaatatttggttgtcagtaacgctgagttttgtacacagaagattttttgtgtattcatcaaactcattcagcgattccagccgaactactgccagacgttttctttttttcagaagctttttcatcttgcttctaaaatcctcatttatttcataagcctcatcgtttggatttatatccgcgtttctggtggcgcagaatatatttttatcactcacggtataccgctcaaaaatattttcaaagtacataaatataatgtcttctatatgtatgtacctgatttttttgcccggcatatagagtatgggcggaagcgcaggcggaattgtcacaattcccagcgaaactgatttttttctctgaacttttccgactacgcatatttgttttgaggcaataaaaggaaacgggtggtgttcatcaaccaactggggggaaagtattggctgaacataatttgtaaagtattcttttacaaatttcagttcgtcagccgtcagcgcttcaggggtgagatgaacaataccatagtttttaagattttgagaaacagaggaataaatagcgtccttttctaaatataacggccgaacggcggagtatatttttgtcagctgttcagtcggcgtcataccggttttgttgtcggttgcctttttgtcggcaatagaaaggtcgaacagacttcccacccttaccataaaaaactcgtcgagattactgacaaagatagaaacaaattttaacttctcatacagcgggacctcatcgctgacagcttcatgcaggactcgctcattaaacctaagccaagatatttctcggttttgcataaatttatattccggtttagcagagttttgactcataaattatcaccccagcctattaaaaatagtttgtcgtttaaacggattattatgtatatattatacagcgaaaaaggtcagattgtaaagtaaaatgtatgtaaaatattactaaaaaagtactgattaaaaaataaaggctccggcgaaaaaccgccggaaccgcaaggcatgtatttgcttaattagcagccgcatccacagccgttgtcgcagccgcagccgctgttgtcattgccgcagcagcagcaaattaagataataagaataattatccaaagacatccgccgcctccgccaaatccgttaccgaagcatcccatctgtgtgcacctccttctgtcctcgctgtcagtgggtggtgtgcaatatgctttccgccgtgaaataaaagcatactgcacaccgccccacatgacagtcaaaattaaaatcagttatataagtacattaatgttctgtggtaagaaacaaagccgggaatttattagcagcatccgcagccattgttgtcgtttccgcagcagcagcaaattatgattatcaatatgataatccaaagacatccgccgtttcctccaaagcatccattcatttaataagcacctcctaaagtgttttcactgtatactatgacaaaattaagaattggtgaaaagtttttaaaaaagatttacataatttcaatattatgatattatttcatgtagtgaaaaggatttttgcatatatgctcttacagagccgaacattatgcgatggcgtaaaatatgaaagcggagggatcagttaatgaaaaccgatattgaaatcgctcaggagtccgttatgcagcctattgctgagattgctgaaaaacttggcatgtctgcagatgatattgagctttatggaaagtataaagcgaaactcagcgaggattatattgaaagtttagaggacaaccctgaaggaaaacttgttttggtgacagctataaaccctacgccggctggcgaaggtaaaacgactgttacggtggggctgggagaagcaatgcccaagattggtgaaaacgctgtcattgctctccgtgaaccgtcgatgggtccggttatggggattaaggggggcgcagccgggggcggctatgcccaggttgttcctatggaagatataaacctgcattttaccggggatatgcatgcaataacagccgcaaataatttgctgtcggccgcaatagataatcatatccaccagggaaataagctgatgatagacctgagacagataacctggaaacgctgtcttgatatgaatgacagggctttgagggaagttattatagggcttggcggaaaaattaacggatttccgcgtcaggatggttttaatattactgttgcaagtgaaataatggcgatattatgccttgctaaaaatattgatgatttaagagaaagaattggaagaattgttataggctataatttgtcaggcgagccggtaactgcaaaacaattggaggtagaaggcgcaatgactcttctgctccatgacgctataaagccgaacctggtgcaaacccttgaaaataccccatgtctaatgcatggaggtccgtttgccaatatagcgcacggatgcaattctatcagagcaaccagagcgggacttaaactggcggattactgtataactgaagctggattcggaagcgatttgggcgctgagaagttttttgacattaaatgtcgttttgccggattgaatcctgactgtgtggtgcttgtggcaactgttaaggcacttaaatacaacagcggtcagataaagggagaagcgctgaagtatgagaatttggaagccttgagcttaggtataaacaaccttggcaagcacatagaaaatatgcggaagtatggggttcctgtagtggttgctattaacagatttgatactgatactgacgcggagcttgattttatagaaaattactgcgctgagaaaaatgtgaagtgttcaatgtgtgaagtgtttgcaaaaggcggagacggaggagtggatctcgcaaagaaagtcgttgagactataaagtctgagccttctgagtttaagccgatttataacgttaatctgcctataaaggaaaagattgagacaatagcacgggagatatacggagcggatggagtaacttataccgccaccgctaacaggcagatattgaatctgacaaatttggggtttgataaaatgccggtgtgtatggcgaagactcagtattcgctgtctgatgacccgtcacttttggggcgtccttccgggtttgatataacaatcagagaagtaaacgtatcgagcggagccggatttatagttgcgctgaccggagcggtaatgaccatgccggggctgccgaaagttccggctgcaaataatatggatattgacagaaacggaacaattgtaggattgttttaagcaataatatataggagttgaaatcagttgtttacatcaaaggatatatatgacgttatcgttgtgggcggaggccacgctgggattgaggccgggtttgcctcggcgcgtctcggaatgaaaacatgtattttctccataagtctagacgctgttgcgaatctgccgtgtaacccaagtattggggggacggcaaaggggcaccttgtcagggagatagacgccctgggcggtgagatggggaaagtcgctgacaaaacctttatccagtccagaatgctgaataagggtaaaggtccggcggtgcattctctgagggctcaggtggacagacggaattatcagatggagatgaagcaccgcattgagcttgagccaaatctagatttgagacaaggcgaaatagttgaggtaaagacagacgataataataacgtgaaagctgttgtcacaagaaccggcgcagagtttttgtgcaaggccgcgattgtatcaaccggaacctatttaaaatcaagaatagtaataggcgagttttctcaggagagcggaccggacggagtgtttccggcaaccgagctttcaaaaaatctgcagaatatcggagttgagctaagacgttttaagaccggtacgccgcctagaataaataggcggagcatagattttgatgagcttgaagaacagattggcgatgatgtgataattcccttttcatttgagacgaatggagagggattggtcaataaagtttcttgttatattacctataccaataaagagacgcacaggataataaatgataatcttcacagatcaccgttatacggtggcggtggaatcgttggaataggaccgaggtactgcccgtcgattgaggataaggtggtgaggttcagtgacaaaaacagacaccaattatttgttgagcctatggggctggatacagaggaaatgtatttgcagggattttccagcagtatgccggaggatgtgcagatagatatgcttcattccctgccgggctttcataacgctcaggtcatgagaaacgcatatgctatagagtatgattgtgccgacccgcttcagctttacccaacgctggagtttaaaaaaataggcgggctttatggtgcaggacagtttaacggcacatcagggtatgaggaagctgctgcccagggcttgattgcaggaataaatgcggctctaaaaattaagggaaacgagccttttgttctggaccgctcagaggcttatattggaacgctcattgacgatttggttacaaagggaaccaacgagccgtatagaatgatgacctcaaggagcgaataccgtctgcttctaagacaggataatgctgatttgcgtttaaccccttacggttatgagctgggcttgatttcatcggagagatactcaaagtttttgaccaaaaggcgtatgatagaagaggagacggcaaggcttcaaaatttgatattcccgccgtcaaaagaggtcttaaattatttggaatctgtcggaagcactccgatttcaacaggggcccgtgcggcggaactgcttaaacgtcctaatataacgtatgagggcatgaaggagatagacaggggcagacctgatataccggacgacgttgccgaacaggttgaaataagtataaaatatgagggatatataaacaggcagattaaacaggcagaacagtttagaaaacttgagtctaaaaagctgccggaggatattgattacagcaaaatagacggtctgagaatagaagccagacaaaagctcgagaagataaaaccgtcatccttaggacaggcttccagaatatcgggagtaaatccggcagatattgccgttttaatggtttatttgaaaaaatagtaaaattgaaatagaaaaataatataaaatttataaaatgtttaaaatgcggacatagtataaaaatatttttgttttataatgtgtaaagtaatttgttttaaaatatagaataaaaggagaattgttatgaagaagatattatgtgcagctgtcgctgcagttttagcagtcggagcattaactgcctgcggaaataagccgagcgagccgtcgggtgctgacgccggtaaaaattcacagcagaatgtgactactgcagaaccggcttcgtcaccgtttgtgccggaggaggttccaagccagtttaaggcgaacggcagtaatattaccgaaaaggaaggcggaggcgtttctgtgtctgttgctccgagagaaggagacgagagatataattttgaaaatgacgatttaggatttgttgacactgagagcggagctttgctgaaaatcggcatgtcatccgaggatgtggaaaaactcataggcgctccaagaacagttgaccgtgacggttttagaatatacagcggaatcgttataaaatatgatgataacggaaacgcttcacaaatgattgttgcagccggcaatatggaaggcgatgataacccgaatagatttgtttcaccaagaggggttaagctttcaacaacacttgatgagtttaaatcagtatacggtgatgagtacaacgaaccaagccaagcagcggaaggcgatgagtctataaaatcatctgctatgatggctgttagatattatgcaaagaacggtgatacttttaactatttgggcggaagctatactaaagaaaataagcctgaaaacgacgctgacttgataatgcagactttcttattctcaactgagaccaaaacggtcagcgttatgtcggtaggaaacgggacagcaaactaaaaaacagccggcttgttatttgtttcaagccggcctgttttttggccgaaatttttgataagaagtttttttcgtatagtgtgcgacgtatttcgacaaaataatcgaaattattcacaaatagttaattttttctttacagattattcacttaccaatgcaaaaaggtggtataatatgtattgtaacaagaaattgttacagagttaaaacataactccctcccttttaatttgtaagaccgttcccccaaacggtcttatttttttgtttataattaaaaatatgatgcaaagtttagatattattaacggaaagacagagattcacgacaagacagtattcactgcaagagagtgattcacattctttaaagacgttatttttttgagtgatgcactcttgcaaaaacaatggttggcgactaatactttctgaattcataaaaatcatctcgtataattgcagtttcgttttgctcttgaagaagagctgaattacttagactttgcggattggtttaatttcctctctgcgatatggttttattggatgagcctttttgcgttttttatacgggaaactatagttttcagaaaataatttgttccgcaaagagggcggcaaaattattgagaaatatcagacattctatttttgcataaaaagtttaattctttaatgttgattttatgatgtttaccaacccttttataataaaatatttgctgtaagtttcttttattattgacgtacatataaagtatcttatttaaatacattaatttaataattaatacaagacttgaatttttcatgtttttgtggtaaggtaatgacataaaatgataaaaatttttaaatattttacataaagctgtaaagcagaaaatgtatttgatttgaatatacgtattaatgatgtattgatttctccatatggtatagttcggttaagatatttcttctgaagttcactaaaaaaacactgtatatagaaaataactataaaaaaataaattataaaagatgtggttttgcaagcatcggagggctgtgaccacacttttcttaaaaagtgtgtgtaatacatacatactcatttctttacaacctacaatgtcattaatatgtatactcaataaagatgaaatctgccacgtaaggcgcgcagtcacggaaaaatttaataattatattacaatgaactattctaagtatgttcacgctacgcgtgagatggcagctcacctaacgaggtgtgcataagcacacaatacatcacaactacgtaatttattgacattgaaggctataataaaacaaattactttgtatcacacccaccatactggtggggtcacacctaccgaagttcactaaaaaacaccgtgtatagaaaaataactataagataatagattataaaaaagattggtttagcaagcatcggagggcagatgaaatctgccacgtaaggcgcgcagccgcgggaaaatttaataatattattacaatgaactattctaagtatgttcacgctacgcgtaagatggcagctcacctaacgaggtgtgcctacgcacacccttccgaagttcactaaaaacactgtgtatagaaaaataactataaaataataaaatataaaaacgagtggtatagcaagcatcggcaggtgtgattgtgaccacacctgccgatgttcactaacaaacatccttaatttttctgtatagctttctgtagaccttccggttatactaaaataagtaattaaatatcacccactttacaggtggggtcacaatttgagtgttcaaaactgatacatataactaaatcatattttatctgttttgagatatagtccgtaccggtaaaatttaagtttcatatattatgttgatttaagaaaggatgaaataaaatggctgataaaaagattaaaggcgtactttttgatatggacggcactatgtttgacacagaaacaatgtcaatttatatttgggcggcaactgctagatattacaatataaatatttccagagagtttatgatggaatgtatgggtctcagcacgaaggctataggagaaaaatttgataaggcgttcggagatgttctgaattatgagacatttcgcagcgctaaaaataaagttatggaagagattgtggaagaggacggagtgccacacaaaaagggtctgacggaaatccttgattatattaaggaaaacgggattaaagccgctattgctacttctacatctaacgagagagccgtgtataatcttgaggagggaaaagttatacagtattttgacgaagtcataagcggagatatggtggacaagagcaaaccggaacccgatatttatttgcttgccgccaagaaactcggtctaagacctgaggagtgtatggttttagaggattcaaaaaacggcataatctctgccaggagagcaaattgtttggcggtgcttgttccggatataataccggtcgatgatgaaatgattgaagccgctgattatgtatgtgaggatcttttagaagttattgatttgattaagagaataaataaataataaatatcagggcttaaaaaatatagttcaattgttatgtagaatgaaaatatttaaaaaccattgtaaaaggcttgttctgacgtgaacctaaaaatcggacttttttgggtttgttcattatagtcaaaacacaatggttttttgcttatttttaataataactcttttataacatattttatctaaaaaaataagaccgtttgggggaacggtcttacaaattaaaagggagggagttatgttttaactctgtaacaattccttgttacaatacatattataccaccttttcttgtttatgggtgaataatctgtaaaaatcaaattaacagtttgtgaacataaaaacaggagttatttaacatattatagtaattttatattcattattaaacgtttgaaacgtgacgataataatagtttaattttgatgaaatttattaaaaaaataattggttgatttacggaatgtattaagtcatataactttcttccgaaacgaaaagttgttatgtaatataagtgtaaagtcgacagaaaactatacagaaaaattaaggatgttttttagtgaacatcggcagggtgtgaccccaccttcaggtggggtcacagacattgtaggtttatcaatacaaagtaatttgtattacacacacttttaaaaaaagtgtggtcacagccctgccgatgcttgctaaaccacagttttatataatttatttgttatagaattattttttatatttgaaccttaacatttgtggccgcttgattgtaaactttttatatttttgaaaatatatagcaagttatcggaaatatatttattctaaaaaaattttggaaatacttcaggaataaaattttaaaaactagaagtcagacggaaataaaatatcttttaaacaagtcgtacttaaatgctcttgctggaaaaacaaaaagtccttagtttaagcgttagcttaattctaagaactttttttatttatattatttaaagctgtttgctgttaaacaatatagaaaattatgataaaactgcgccggtgcttccggaacttacaagttttgaatatcttgcaagataaccggttttaatattcggttcttttggtttccagtttttgcgtctttcctcgagttcttcatcagaaacttcaagcttaatcttatagttcggaatgtcaatggttataatatcgccttcttcaaccaacgcaattgtgcctccttcggcagcttccggagaaacatgcccaatagctgcgcctctggttgcgccggagaatcttccgtctgttataagagccacgctgttgccgagaccgcttccaacaattgcagcagtggggtagagcatttctctcattccaggtccgcccttaggaccttcgtatctgataacgattacgtcaccgggatttattttgttgtcataaatagcgtttactgcgtcttcctcacagtcaaagactcttgcttttcctgaatgtttcatcatctcatcacatacagccgagcgttttactacgcatccgtcctcggctatattgcctttgagaaccgccagtccgcctgttttgctgtatggattatcttttgagcgtattacttcgttgtctgtgatttcacatccgcttatgttttcaccgacagttttgccggttaccgtaatgggagatttatcaataagacccattttgtcaagttcattcataaccgcatatacgccgccggccttgttaaggtcgagcataaaatggtttcctgccggagccaaatggcaaaggttaggagtcttttctgaaacaacgtttatggtgtcaaacggcaggtctattccgcattcgtgagcaatggccgggagatgcaaggcgctgttggtgctgcatcccaaagccatatcgacggtaagcgcgttaataaacgcttcctttgtcatgatatctcttggttttatatcatctttaacgagttccatgatttgcataccgactttttttgcgaggcggagacgctcagaaaataccgccggtatagaaccgtttcctttaagacccattccaagcacctctgtcagacagttcatactgtttgcagtgaacattcctgaacatgaaccgcaggtaggacagcagttttcctcacagactttaagttcgttttcatttatttcgcctactttaaaacggcttatagcttcaatcatggtcgaatagcttgcagactcgccgttccagtctgaacctgaaagcataggtccgccgctgacaaaaattgaaggaacattaagtctggctgcagccatcaataatccgggcacgttcttgtcacagttgggaaccataaccaggccgtcaaaaggatgagctgttgccatggcttctgtagaatcggcaattaattcacgtgttacaagtgagtatttcattccctcatggcccattgctatgccgtcgcatactgcaatagccgggaatactataggaactccgcctgctaaagcaacgccctgcttcactgcgtcaacaaccttatctatattcgtgtgtcccggaactatatcgttcttcgagcttactatgccgataagcggcttgtttatctcttcctcggtcagtcccagtgcatagagcagagaacgctgaggcgctgcgttaacgcctttttttatcctgtcacttctcattttatttcaccctcctgtatgtatttgtatattaatcttctgaccttaaattatatcttagattaaagtttatgtcaacctgaaaatatcacaaaccgacctttttatacatgctgcagattatattatatttttaaaatcaaagcctgtattgtacttgcccaatgaacttatttatgctataatttagtaaatatctgtctgaaaggacggtggaactgttgcaggttggaatcatcagaaagattatcggctgtgccctggctgttttattggttttgggtatagttcctgtcggccttctctactttacaacgccggtagttgctgagggacgagtggttaaaatttcgccgggcgctgagacctttgtatacagtgacgccaaaaataagaacaaatccagactggatgaggataacctgctggtcggtaattactggaacacttatttccggttcgacttgtcggcaatcggaaacgcaaaaaagagcgatataagtcaagcaaagctgagacttgcggtaacctgggacgggagaaatgaaccggatgaaacagactgttcgtttaacgtcagctaccttgataataataactggggagataacatgacctggtcaaccaaaccgggcggtgaggaacaatatctttgcacagctgcgggtaatggttcggacagcatacttgaaattgatttgtcagagtttataagaaaggctgttggcaatgatgaaaaagtttttacgttaaagcttagtccgagcgtgagcaatactgcgccggttcaaatagcttcaacaagatactccgacccgtcataccggccgtatttaaaaatattggtgggtgacgctgtggatactgataccaagacgttaaacaagagttatttggataccaacggttatgtatcaaaggcggaaccaaatacaaactcaaacgagctgctttataaaaataacggaaggcttgcggttgacaatggctcggccgtatacttaaaatttaatatcgaacctaaaaatattctcggcgctgttgaggacgcgcggatttttctcaggtctatcggtaaatctgtgaatacaaaaatcgatatatattatttggaaaatgacggctggaacagtggagaattatcttacaataaccgtccggaaggtgaactgtccctgattaagtcctataacggacttgaagtttcagggggtttcagcgtggatgtaacggatctagtctataagctggtcaaatcaggcaaatatactgccagctttttgatagacggaacacaaaccgacccggcttcaacagacagtctggaactctattcgtcatactctcatgagtttgccccaagcctttcagtatctgtaacagacgataaaaatatgactgcaattcgtgaggctcttatggagttaaagggaaacaacagttcatttgataatgtcacgagcgatttgccgagtagctatatagctgaaaacggagagagagtaacaataaagtgggattttaatgataattattcattgggaaatatactgggattcagaaagagtgtaataacaaattccggtaaaataaaccctccggcattctttgaggatgcaaagacgattcaggcgaaggcgattttgtcatcaggctccagaactcttgaaagatttgtaacgatgactatacagcctgagtttggtgtgccaaaccgtctgcagattctaaaagacgcggttttgggagattaaataaagagtttgattttaaataaatatattggaggagttttcatgaacaataatcaatttagaagtttaaagcgtgtgttgtgtgctttgacagccgttataatggtatttgcgacggcaggagtttctgtttttgcagcagatacacaatttgaagatttgagtggggacagctgggcttatccgtacattgagtattgtatacaaaacggcttgatgaatggtgtgaatgaatcagaattccagccggacggaattgtcagtgatgttatggcaaaaactgtgctgcagaggttagtgccatcttgtgactttgacagttatatatggtctgagccggttgaaagggaggatatggcggttcttgtgtatgcggccggaggttctgctaatactgaggatattgcagtagcctattctgacgcggagaatatttcttctgagtgttatacagcagtagcttggtgctcggtgaacaatattatgtcgggcaaggagaaccaaacctttgacccgtcgggatatatgacccgctctgagcttgccgctgtggctatgcgtttggcggaatacctgaatgcggattctttgaccataaatattattcatacaaatgatattcatggctatgacgtgggcgataaatctgtgattggaatggatgaaatatctgctctgaaaaagcagacggataatgctgttttggcagacgcaggggacgctactcagggaatagcttttgtctcgctggataagggggcgagcgccattgaggctatgaatttagccggttatgatgtgatggcgtgcggaaaccacgagtttgactacggacaggagacagcaaagaaaaatgcggcagccgctgatttcccgattatatcggcgaacaccctaaaagatggtcagccgttttttaaaggcagttatgccgatggaacaaaagagaataatggagaaaatacaattatagaaatagacggagtgaaagtcggattttttggcatattaacgtcagatacagcgtcttcaacaaaaccatcgggcattttgggcatttcttttgaagacgagacggagaccgcaaaaagacaggttgaggagcttcaaagccagggagcagatgtggttataggcttgttccatgtcggtgtttctcaagcgtcatccgtcaccactccagctattgtagacgggcttttggatacgtcaggtcttgacgcggtcatagacggtcacagccatactgtgtataataatactgaaaacggcgtattaattgctcagacaggctcatattcagagaacataggtattatgtcagtttcggtaaaggacggagaggtaaccggagttaaagaaaatatgctcagcagtgctgaggttaaagaaaaagtcactcctgaccctgaggttactgaatatttagaaaaggtaacggctgagcagtcgaaactgcttgacaataaaattgccgagacaaagacaacgctctggggcggttatgtaaataattttgctgtgccgcgtgcggttgagacaaatttgggaaatcttatatgcgacgcaatgatagacgaggttaaaaataatataagcgccgaatacagcggcctgccgattgtcagcgttcaaaatggcggaggggttcgcgcttctgttaagaacggcgatataacggttggcagtatatttaatgttttgcctttcggaaacacgctgtttgttaaggaaataacgccaaacattttatattcagtcatggagagaagcgttaaaaatgcaatcgcccaggacgaggagacgggactgcttgacctttatccagacggaggttttttgcagataggcggaatgagcgtaaagtatgacccgtcaggcaaagagggtgaaaaggttatttctgtaacattaggcggtcaaacagagccgcttgacaggactgattccgagacgaagattctgcttgcaacaaatgattttgtggcaatgggcggaaacgattatgatatggtgcctggcctgcctgagataatgcagggaaccgatgttgagcagatagtctgcgattatatattgaagcttactgataatggagtaaaaccgcttgaggtagacaacacagaagggcgtatagttgaaatgagcggatatacggctaaggattataccgccagcctatatcttaaagatataaacggaaaccttttgactgataagaccgttacggtttatgtggacggagaagcttttggagagtttacatccaatgaagatggaataataaaattaactttaacaagcggtccgcattctgttaaaacagccgagaatgcggaggaagcatatgttaacaatatttgcggacagggaactgttgagtatagaggagaggaagaagtattattccctacacttgtgttagaataatgatataatgtctgccgggtgtctagccggcggcgaatgtttaatatttcagctgcggcataagccgccgctgaactttttgtgatggacaagatagctattgaatttgatattggcataggaaggcggataaaaatggttttggcaataatagatttgggctctaattctataagaatggatatagttgaaattgatgaaaaaaccggatctcatagatatatagagaggtgccgtgatatggcgcggctgagcgagggtatgaacctggacgggaatctccagcccgaagccatagacaggactatctcggcgcttagagagttcaaaaaaattatgaaagaaaataatactgatgacgttatcactgtggcgacagcagcagtcaggaaagcgggcaacagccaggagttcataaaacaggttgaggatgagaccggaataattgtgagagtgataaaaggcgagcaggaggccgaatatgattttcttggcgtgaccagttcgcttgatatagaggactgtgtaatagtagacacaggaggcggaagcaccgagataatattggtaaatgacggagagccgctggcaagaacaagtatacctgtcggggccgtaaacatgactgaacagtttttgtttagaggagaaactgaggaggcgcttagtgcgctgactgattatattgacagccagcttgacaaaatacactggctggaggacgcttatcagcttccgatagttggaatgggcggcagcatatataatcttgcgataattgaaaataatgttccgggagcggacagaagccagcttcacggctgtgtaatggcaggcgactgcgtcgctgatgcgttcggcaatattcttgaaatgaatgaaactgaaagaggcgacgccgggatagaagcttccagaacagacactataattgccggagtgctgccgattgtggagcttataaacaaaataggctctgaagaagtgatagtatcatctgccggattaaaagagggaattttggctgagtttatcgaaagtataaaataacggcggagaaagatatgacaaaacttgaaattttaaaacaatattttggacatgagaagttcaggagcggacaggaagatattattgacaatattctgtccggaaaagatgtgctgggaataatgccgacaggagcgggaaaatcggtttgttatcaggttccggctatgttgatggacggaataaccattgttatttctccgcttatatcccttatgaaagaccaggtaaggtctcttacggaatcgggtataccttctgcatatattaatagttctttaagttaccgccagctgcgtgaggtgtttaaacgggcggcggagatgcagtataaaataatttatgttgctcccgagcggcttgtgaccgatgattttttggattttgcggaaaactcaaaaatatctatggtaaccgttgacgaggctcattgcgtgtcccagtggggtcaggatttcagaccaagttattttaaaatttcagagtttatcgatactttgtcgtataggcctgtggtttccgcttttacggcgacggctactaaaagggtaagcgtggatatctgcaatattctaaaactcgataacccgtttaggatggttaccggatttgacagaaaaaatttatattttgaggttcagaatccaaagtataagcttaatgctttggtggatatactcaaccgtccgcagaataaggaaaaaagcggaatagtttattgcataagcagaaaaggcgttgaggaagtatgtgacgaactgatctccagaggctttgcggctaccaggtatcacgcaggtttggatgatgaggaaaggcgcataaatcaggacgactttatatatgacagaaaaacagttatggttgccactaatgcgttcggtatgggaatagacaagtccaacgtttcatatgttgttcactataatatgccgaagaatattgaaagttattaccaggaagccggaagggcaggaagagacggcgaaccggctgagtgcgtattgctttacgccccgaaagacgtcagaatcaataagtttctgatagaaaacggaaacgaaaatttagaaatgacagaggaaatgcgccggcaggttataaaaaaggatttagaactgctgaagcatatgacgttttattgcactacatatgattgtctcagaggttttattttaaaatatttcggtgagacagcgccgatatgctgtgacagctgctcaaattgcaatacgaggtttgaaacagtggatataaccgaggaagcgcagaagattctaagctgtatatataggataaaacgtcaaggacgcgctttcggcaaaaacatggtggctgatattttgtgcggttcaaaaaacgataatgttatttccaggcatttagacgagttatctacgtatggaataatgtccggtatgaccaagaccagagttatgaatataatcgaatttttggttcagagcggttatataataaaagacgaggataattttaatattttagtaccgactgagaagtcaaaaagcatattatttggcggggatcggctttcaatgaaagcaccgaaggagaaaaaggctaagaagaagccggtgcaggctgaaacagttaacgagggactgttctcaaagctgagggatctcagaaaagagctggctgagagaggcagtgttccggcttatgttatattttcagatgcgtcgctccgtgatatgtgcaggatacttccaaagactttggatgagttcgagacagtatcaggtgtaggaagcgcgaagcttcaaaggtatggggaactttttgtcaatgaaataaacgactatttaagaactgataaatgagaaaattatgcttaaaggctgcggacaatattgtccgcagccttagattttgtaatattattttctataaatcaaatatattacagagtatctaaaattgtttagagcataaataaaaaaataacacttagttctaaaaataaaatattaaatatagataaaaatttatcatcataatatgtgttattatcaacaaaataaaaaagctccgcaaaaattatatgcggagcaaaacctatattattattgcgataaaacggcatgttttatataactatcccatacggactgctcattatgtcgagcgggtcaccgtcccatataacaatatccgaatcctttccgtcatctatagaaccaactctgtctccaatcccgcaggaaacagctggatttatagttattgcccttaatgcttcatccttcctaagcccatgcttgacagccatagccgcgcatagggttaaatacttttcaggcgtttcagggtgatcagttattattgagattttcagtccagcctctgatagtacggcaggagttacttcactttgatttttcagttccggcttacttcggtcagtgagtattgggcccagcagaaccgggtaaccatcatctgccagctgctcagctattaaatgcccctctgtgcagtgaaccaatatcaaattaagattaaattctctggcaatgcgaacggccgtgaatatatcatccgctctgtgcacatgcgcatgcaggggtatatcaccatttaaaagcggtaacagcgattctgactttatgtcatattcgggagggtcttcctcatcagagttattttggtactgctcaacctgcctttggtattcctgagcttttttaaacgtctcccttatcaatgctgctgttgccattctggtactgggcgactggctcttgtcgttataggtagcctttgggttttcaccaaaagcaatttttatcccaacaggagcttttattatcatatcatctatacgcttcccgtatgttttgattgccgccagctgtccgccgataggattagcgcttcccgggccggttataacagtcgttataccggaagcaaaagcttctctaaaagacgcctccattggatttatagcgtctatcgcccggagctgaggagtacagggatcggtatcttcgttcccgtcatcaccctcaaaatccaaaccgtcctcccacattcccaggtgtgaatgtgcgtcaaccaaaccgggagttgtaattctcccctcggcttcaattatctcggcatcaatattgctatctgaaaagtcagacatttttccaacttctataattttatggtctagaattttaacatatccgttttctatattgccatatttttcactcatggttattaggttggcatttttaattattttcattaatattaattgctcctttgttttatccaatacgtttttgcgttaaatttatttgcaagctctgtaccgtcagtttctccgagaactagacaggcggtagacaaacagtccgcctcaagtgatgatgaagaaataacactgacactgtcaaaaccgctgtcagaaggcgttccggtcgatgggtcgagaatatgatgatagtttttgttgttataataaaagtgcctttgatatgtgccgcttgtaactatactctccccggaagttatatcaaccatttcagaataagttccgtttgccgcaaaaggttcctgtattccaaccgtaaaacttccgtttattttttttggattttgaccgtaaacgcttacgttaccgccaaaatcaagtatagcgtatgaatcgggataattttcttctatatattccaaagctttttggcaagcgtaacctttgccgcatccgcccaaatcaatttttacaccgtcaatggttttagtaagagttttgttttcagaatcaagtatcaagttgttatacccgacatattttaaattttcatttatcaaattctgttcaggaggaaccggactttctgatttgaaatcccatagttcctcaaccggagcaattgttatatcaaaggctccgttcgaagctttggaaacttcaagagccttttctacaatagtatatgtgtccggatcaagcgctgcaggaacaccagcaggcgaactgttaaatatggagacggtagagccggaatcataatagcttatactgctttgaattttatatacgacatcaaaggcgcctgaaatcaattcttttgtatttttcacaccgccggcggttatggtacatacggtatctaatataaattgggtgtcagatatggtttgatactgggccgagcagcctgaaaacatagttattatgataactattaacaatatatatgtcatgtattttattattttatgtttctttttattcttcataagcacaattatatacgatttacataaaaagtcaattacttttgtatttttagaaaaacttttattattttttaaaaaggggttgatttttttgaacattcgttgtataatactaacgtatcataatagtgaaaaataaataaaatgcgttatttatcagtttgaacctattagccggatgcacatttccggttgttttgggtgtttgcctaagacttaaaggttatgttctgtgatccgcatttcttacacatttttggggaaaggaggataacctcgaattttgagattgtagtttaaaattgcagatttaattgggaagaaatcgacgattttataaacaaacaaaattaggaggaaaattaaatgaagaagagaatttttaagtttggcgcagctcttacagctgcattaatgatgttttcagcaacagctagtttagctttcgctgagggagatgttgttgacaataatgcagacgcatctgttacagatacagttgaagctccaaagcctacagctatgcctgaagatgtggaagcacctgaagaagacgttaaggctcctgctgaggatacagatgctcctgttcctacagaagctcctgtagattcagaagaagtaaatgtaccgcttgacacagcgccggttacagaaggcgatgttaatcttgaatctaagattgatgacgttgacactggttcagtagttgagataggtaaaatttcagcttcaaaagatgatgctaacggatactataatgtaaacgttccgtttacaattgcttccggtacagaggtaccaagtcagatgacattctttgtatatgatatcacaagtatcacaggcgatcagaacaatacagttggttttacatctacaacacctgtaggttatatcaaccagtatgacggtcaggcttctggtacatattcatttaagctgtcacagactgactacaatgatgattcaattattattgtaaaaatcggaggaaccggtgtttcaacacctgacgctaagtcatattcattaaaaacagctcctggagttgtgtatggtgatgtaaatatggatactgatattaatgcaggtgacgcaatacttgttatgcagtatgcagctggtaaaacagagctcagcgatgatcagaagactgctgctgatgttagcggtaccgatggtatcaatgcaggggatgcaatccttataatgcaatacgctgctggaaaaatcacaaatttccccgtagaacaataagagaaatttatttaataactgactcccggcaatctgtcgagagtcagttatacaatactacttgaaatatgttattttcatggaaggagttttaattaatgagaaatttacgaaagatcacagcaattactgttgtggtagccatggttctcagccttatgtcatttggttcagttttcgctgcagaatatgataattcagtagttgtaagcgcaacaccatctgcagagtttgtagaacaaggcggaactgtagatgtcactgttgatttgacaactgcaaaggcatttaaatcaggtataatcggatttaatttggtattcgatacagatgtatttgaatatcaaaatgttgagtttacatactatgatgatgatcttggtaataaggcatcagattgggaagcaaactcaggttttaatacttcaacaaataaatttgtgtttggaactctcggcacaacagtatacacagctgacaatgcaaaacgtcagtcactggctaaagttactttaaaagtaaaagatactgctaaagacggagttcagaatatatctattgagacgtttaacggagctgacagtaacttggatttggtttcaagtactttaaattctgcaaaagttgagataggtaaagcaccggcacagactgttaagattgatgttacaccatctgcagaaaatgttgcacaaggtggaacagttgatatgacagttgatatgacttctgcaaaggcatttaaatcaggtataatcggatttgatttagtatttgatacaaatgtatttgaatatcaaggtgttaaatttgcttattatgaagatgatttgggtaaccaaacatcagattgggaagcaaactcaggctttaatgcttcaacaaatcattttgtatttggaacgcttggaacaactgtatatacagctgaccatgcaaaacatcagccgatagctgttgttactttgaaggttaaagataatgcacctgacggcgctcaggctattaatttgacaacattcaatggtgttgacgctaacttggataaggttggggcaacaatgaattctacaagtgttactattggcggagcagtagttccaacagctacagctgttcctgttccaacagctacagctgcaccggttgaaaactatattgctactttgaatgtaacaaatggtacaggtactcttacaaatgcaagcggagaggtttatccgacagttgccccggcaacagaagctcccgttccaacagatgcacctatcgttacagacgcaccggttgttactgacaaaccagtagttacagatgcacctgttcctggtaaatcagttgaatggacatttgctgatgctcctgcaggaacaaagcttgttaataaagctggcgctgaaaaagagtggtatgtaggtaatgtggatttaggcaatagtctaatgtcctattcaaatggaacaattgatgagaataagatagagtataaggatgcatttgaagttgatagaaaaactgacacagaatttactttagagaatggcacaactgagactgtaactggcgctcttaagtttggcggtaagactactgctgcggctagatacttaacttacacaccgtcagcagatggtgctataacagtatatgtaaagcatggtagtcctgataaacttaatactgatattcgtaacttaatagttgaacaaggtagcgagaagactatcgtggaaactattggtacagataagaagtttgttgttcagactgtacctgtagttgcaaacagcgaagttaagatttcttgtgacggcaatgtcgctttagctaaattagtttacacaccagcagcaaaagctgcaagtgttgctgctgatacagcaggcgctcaatacatcattcctgccggtgatacagtaacaattaatgcagtatctaatatcgctggtgcaacagcagtagtaactgttaaagctgcagacggtacagatattgctgtatcagacagtaagtttgtaatgcctgagcagaatgcttcagttgatgtagtattcggcggttcagtgccgacaccttctgctgatccggctactataacaacaattgctggttctataactgccccggcttcaaatagagcagtatcttatgatatcgctgcacctgaaggcgcacgttataaacttagcgacgtttcttggaatccggcagtagagtcaagatatgaatataacacagtttatacaattacatttacagctacagctgatgaaaactgcacaattagcgcagatgcagttgcaacagtaaattcttatgatgctgacagtatcacagttagcgctgatggtaagacagcagtcgtaacatatgagtttgctaagacatctaagaagggctcaagcagcggtcctagcggtccagacacaggcaatacaggtaaagctacagcaacaccggctccgacaaaggctccaacgcctacaacagagccaggtaagcaggtatttgaagatgttccgtcaacatactgggcttacagctacatcatggatctctatgatgcaggtatcgtaaacggtgcttctgctacaatgttctatcctgagaacaatgtaacacgtgctgaatttactaagatggcagttgtactcttcggacttgattctaaatcaactgaatctcagttcactgatgttcctgcaaatgaatggtatgctaagtatgtagtagcagcaacagaagctggaatcgttacaggtatatctgaaacagagtttgctccgaatgatgatgtaacacgtgagcagatggcagcaataatcggacgttatcttgatataacatctaaagcagctatgaagtatacagattctgcagctatttcagattatgcagttccgtatgtatctggtttaacagaaaagggtctgttaaccggtgaagaagacggtacatttagaccggctgcttcagcagcacgttctgaagccgctgcacttctttcaagagtaaaggcaacaatgtcagctcctgaagagacagcagcaccggagaaaacagctgctccggaagcaactgctagcgcagagccggaagctactgccagtgctgagccagtggctacagcaacagcagcaccggaagctacagcaacaccttctaagtaatttgaggttaagttagctataagggagacccgaacctcgggtctcctttttaaaattttgctattttgctatatacaattaatttaactgcgagaggagaatcacttatgagaagcatgaaaaaattatctatatttgtttctatagttatgatttttaatttagttgttattcccgtatttgctgacaattctgataaatctataactataaatatgatatcatcgacagatactgtacagcccggagatacgtttgaggtggacgttaatttatcatcaaatgagtcgtttcattcggggataattggatttgacttatcatttaattcaaatatatttgaatatagtgatgtaaatttttatacaagcatagacgaacttggtaacaattcaagcgattgggaagaattatcgggctataatgaaactacaagacattttgtttttggaacattaggaaccactgtttatgcagaaggagcaaacacctctaatactgttgcaaaaatcttttttagagtaaaagacaaggatgaatatggaacacaaacaataaagattgaaaaatttaatggtgtagatagtgaactgaacaatcttgaagcgtctctgccaaccattcaaattagcgtagtaagcgatattgtgccaacgcctaatccaacggcagagccaacagaggctccaactgctaagccaacatctaaaccatcaggaaatacaaataatagtactgatccaacatcgactccaacagcaactccggcagtatcaaaaagtcctgtgccaacttcaacacctgaagtaactgttgctcctacagcgtcaccttcaggtcaggtatttggggatgtagccgaaggctactgggcttacagctatattatggatttgtatgctaataatatagtaaatggagataaagacggcaatttttatccggagaataatgttacacgtgctgaatttactaaaatggcagtttcattatttgaaatagagtcttcgagtactgaatcagcgtttacagacgttccggcagatgaatggtatgctgaatatgttgctgcggctgctgaggcaggtatagtaacaggtacaagcgaaacaacattctcaccggacgaaacagttacacgtgaacaaatggcaacaatcataggaagaaagctcaatcttatatctgaaactgcttctgaatatactgatgcagataccattgcggattatgctttaggatatgtaacaggtttgacagaggcaggttatcttacaggtgacgacagtggaatgttcagaccacaggcgactgctacaagggcggaatcagcagcgttgctttcaagagttcgtacatcaaatacagctgaataagattattgaatattgatgtatttataaaatttgtttaaacttatatccggcggtattccgccggatatttttgtttagcgctttaaagcgttggaattctgttagttatatgtggataaaagttttggcaaaaactaaaaattctcaatagcataatcagtaaagatataaaaaaacacaatgaaagagtattaagaaatttcaaaataaaaaacaaaaaattgatagaagttaaaaccatagttcattttaaaaaatagatgcaaatatttaatagcattgtgcaaaaaatagctccaaataaatctatggtaagttaaagaaggttacaggcggcacgttgaagaaggtttagcaagcatagaagcatagaagcatagaaacatagaagcatagaagcatagaagcatagaagcatagacatattccaatcatttttatatgctgatgaacattcacaaatttgactatgatatagtttatgtaatatctaaaggaaaaagagctcattaatgatattatatgaacatggaaatctaagttacaaaaatgtgagtaaatatgttagatatatagaatactatgtagatacagtatgaagtgatagaagtcaatatttgactacatcaaagaccagttagaagaatataaaccggttggacagattagatgttcttagatccgttaactgacaacagaaataagtagataaaaaagacaattatacgtgaacggttgcttaaaatcataaaaagttatacttagtaaatcatttagaaaggtcagtttctcattttatggtctgtatgaattctggtattgactttaaacggtttttgtaaataattttaagccgctcatgcttttaattattgaaagcttctaaatttttaattttgagattaatacgatggatattgaggggctcttaaaagtttataaaaacgtataagttcgaatttagaaaaatattgtttctgaaaacttatacaaaaaattaaactgttgttgaattttataaaaaatgtggtataattatcctagtgctgtatactctttttgtttttaagattaatgtaccatattaattttttaaatatagggatatactcttgcaaaaatatattttttaatgcagtaaaagcaatagtgtttttataattgcacaataattgtttttgttttgtgtaagaagattttaatttataacagttgattaaaaaactatgcgttataaatatttggtgtaattagttttttatgttttgtaataaagtattctaggatgagggaataaaaacatgattagaaaatttatatattatctgatactgactgcagttgtcttctcttgtgtgacggttcaggtaccggcatttgctgatgaggcgacagaagattatactgatataacgcattcattaagcaatgagcagagaaattctcttagtgattatctttgtaggttcggcgcgtgttatacaacagattttgagggagagaacggcggcaaaattgtattggatcctggtaattggactaaaaagatgtctgagataatttggtggcagtttttggcttacagcaagcgcgacaggcaaaaccctaacgctcctatagacggaaatactaaaacggttactccatcaactcttcggctctgcgttaagaatacttttgcggtgtcagatactcctgacgcggtgcgcagtgtggctgatgattattacatagaccatacagatggaaactatcatccgccgcagcaggacccgagcggaactatgtggacaagatctccggaaagctgtaaaatacaatactttgttaagttgaaagacggaacgtttttagtacattatattccggaatatttggaatcagctgaaggtatgcacaatggttcattatattatgcaaaactgaaaactgctgatactagctcaggatatgttgcaacggagctcggtactgtttcggcaattgatgataaatacattaaaatgggatttttagacgctgccgataaaggttcggaggctttgtctaatataaatattgactatgagcgtaccggcgggtttacaaccataaaagagtatggcgattatttaacagaaattctcgcaggacttggagaaaattctccgaatggtccgggtgtaaacgatattgcggcgtatatatcagcggcttgtctgagaaattctaaaattgagcttaaagctgagaataataccgtaaatattaatttgactaatatcagagactcggctgttgcagctgctgcaaccagtcaggaattatggaaaattgcaggagaaaaggatatcaaacctaacaaaagtattgttgttcctatacagatagttataaaagaattaaatgacgctttgcctccaaaaattatttttgacagtgatttaaaagatgatgatttgggaatatctaacatgcgtatacttataggcgataacagtcacagtgttatcatggacaaagcaacttgtaataggataattgatgataatggtgaatttactgttgaaatgggttccgcaatcggcggcggatatataataaacttttttgatcaaaataatgagaggatagaaaaactgccggctaaagtcaacttttctatccccgctgaaaacgcttatgacagcgtgtttacaaccagcgacggcagggactttaatataggaggaatatttgactccagtaataaagctcttgagtttaagacaaacacttccggtctatttaaagtgaaagcaagtgttcctgagatttctgacattggtgatttaagtgaagatgagcaggagcatataaaactgctggtctcaaaagattactttgcaacggtaggcgggcgttttagaccctatgaccaatataccaattatgatgccgccagagcggtttccggaatattgtttacggtggatactgaagcgagggcgcaatataatgacgttgacgagtcggacccacagtctatgtatgtggcgtctatagaagaagcggggataaagctttattccgaccagggtggccttagatttaacggtaattccgctgtgggtctcgaagacacgtttacaatgagtttggcgttgcttgttgactataagggatattatcttcctgatttagggaatgatacagacagaccgtatgcaagtatatatttgaattatcctgatattcagtatatgaaaaaagcatcattgggaaaacttgctcttggtgcaagagaaggtattattaatgacggaatatcgcttacaaaaactgaaaatagatttgaccggagttctgccgctgagtttttatatagactttttgaacgtatgtgcgaggttgcgccggcaaaatttgacgcaggggaatccgggtataaatcaagcgccgctttttataatccgcttgcaacaatgagatttgatcccccgccaattgtttatttatacttggggtgttttgctgtcggattaatttttgcgcttcttctttggtttatggagaaaaagcataagattgttaatgaaaacgcggccgacgccggcggcgacgatgattattggaatgaatactaggtttgactgaagggagattgcaacatgactatatatagttttatttccacgatattaagctatgtttttacagttataatatatgtgtttattatttttgtcatcaggctgatctatctggatgtcaaaaaaatgagccggtttgaggacaatagtataaatgatgcggcgtgttcaagcctgagaccgataaaatcaaaggttgaactttcagcgcctcttaaacataggtataatatttatggagaagcaattttaggccgaagccgtgagtgtgatataattataaatgagaaatttatttctcagaagcatttaattatttggtatgaagacggcgaatggtatcttgaggatttagggagccggaacggcacatatgttaacgggcagagaatccggcaggaggttatacttgataccgaggatcagattacggtcggcggcttgaattttatatttgagacataaattatatttttaagaattggcggtgagaaaatgggaacagaacgtattaaatcggctaattacagaaagccggcttatcttttgattttattggatatactcggattcggactgctgtatatatcaaaaagttataatatgaacgtggtatataccgggatagccgttcttgttctttttcttgtcatgtatacagttctagtgatatgccgtatgggggacaagtttataatgcttatggcgtttatgcttatgtctattggggtattattgctctgccgcataaacctcgattacggtttcaggcaaatcatttggatactagtaggcggcgcagctttttttgtagcttattttatttattataatattaaaatatgggacagattttggtatatttattttgcaatcggtgtaggattgtttttgttcaccctggttttgggaactactataaacggctcaaagaattgggtatcatttggacctattacttttcagccctcagagataactaaaattatgtatataatgtgcttagcgtgctattactcgggagcatggtctaagcctgtgctgggaaaactttctccgaagtggataactttggctattacttatatttttgtgggatttttggtgcttcaaagagattggggaactatattggttcttttctctatctatttgtttatggtgtatgtatatgagaaagacaaaaaattactgtttttaaatataggtgcgcttggaattatcggtattttgggatataagtttttgtatcatatacaggtcagaatatcaacatggcttgacccatggtctgatatagccagtaagggctatcaaattacacagtcgctttttgctattgcgtcaggcggttattttggacgcggattaggaaacggttcgccgtattatatacccgaagttcactcagattttatatttgctgctatctgtgaagaaatgggagttttcggaggagttgcagtaatcctattgtttttcttaattgcgtacagatgttttaagatttcaattatggccagcgacccttatgataaagctgttagctttggcgttacagttatgtttgctattcaaacatttatcattataggcggagttacaaaaatgatacctctgacgggaattacactgccgtttgtcagctatggaggtacgtctatagttataagttttgcttcgttgggaatagttcaggcaatatccgcgaagacagaaagaaagggggagatgaccgaaaatgaggacgaataaaagaatcatacgcgtcctgattgccatctcgctgctttttttggcgctggtaacttatttattgtggtttaatatgtttcgtgccaaggatgtgtatacaaactcatataataaacgccagtgggagagcgaacagcaggttcagcgcggagagatatattctcaggacggggtgctgcttgccgaaacggagatagacggtgacgctagaatcaggaagtatccaaagggaagattatattctcacataatcggatattgttctcaggtgtatggaaaaactcagcttgaaatgagccatgatgatgaccttattggaaaaggcacaataagcttgactttgaatgagataaagcacggtaataatctcaatcttactataaacgatgaacttcaggagtacgcatatgaacagctcgacggaagggatggagctattgtggctatggaacctactaccggacaaatcttggcaatggtgagtctgcccgactttaatccggaaacaattgaaaaggattggccgtcaatgatggaggatgagaattcaccgtttttagcaagggcaacacaggggttatatccgccgggttcgacatataaaattgttacagctgcaggagtgtatgacaacggaatgaccactgaaacttttgacgatgaaggattatttaaaaaagacgacgtaaccgtatataattataataaagaatcttttggaaaattagatataaagaccgcatttgaagtgtccagtaattatgtgttttgtactttagggtatgagatgggtgcggacgcggtaaaagctgaagctgaaaagtttggggtaaacaaatcatttgactttgatattccggtttcacaaagtcagattcaatataaaaagatgacagatttagacggcgccttggtgtctataggacagggtgggctggttatgactcctctgcatgtagcaatgatggcgagcgctgttgctaataatggaaagatgatgaaaccgtatctcgtagagactgtaacaaccgagaacgggactgttataggacagacaaagccttcagttctatatgacagcattggaactgcatgtgctgactatatcgaagatatgatgataggcgttgttgaggatggaacaggtacaggggctcaaatcagcggtataacagtggccggcaagacgggaacagctgagaatgaaactgataaagaccatgcatggtttgtaggttatgctcctgtagaaaacccgactatttgtgttgcggtggttcttgaaaatgcggcaacttcgggaggaaagtccgcggttcctatagccaaaaatataattagaaagtttttaaagtgattgtgcagaacggataatattaattaaatcgaaacggacgcccaaattaaaaggcgttcgttttgttaagagcagatactaaattttgtgtgtttaaggtttgtatttgttctctgcgatcagttgcggcaataatttttattttacaccgcgcatgcgtaaacacacatggagtagtttgtcataattcttttataataaaaataaccgtgactgcgcgcctaacgcggcaaactgcgtttgccctgccgatgcttgctaaatcatatttttatgtttataatacttaaatttaatatttcagtccgatttaaatgtaatctttttagtccaagtcttagtttacatgatttaaagtataatatgttaatattgtataacacacgtttaatataacataagcatagtcagagcttaataaaacttttgactatgcttatttttatatcacttttaaaaatatattaattttaaataattgtaaccgcgtaaactattgtatatcaatagtttaacttttacttaatatttatattataacacgatgttatctaacttctgcgttatcccagagtttgtctgcatctcccattttgcccaaaaagtctgaaacttttgatttaaactctgatacatctccgctgacagcggaagtaacagcagattcaaaaccggccattgcgtcataagcagctgtggcagcatctgatatttttccgtaagattcctgatattcctcgggggcgtttgctatagtgtctgagagagtttttgttttttcctctaaatcatttttaatatcagaaaattctttgccccatgcggctatgtcctcttcagaactgagagtagacgcttttccaataagagctctgagggattcgcggctctcttcgatagcttcggcctgtttttttacatcatcgacgttatttacgatttcatcgcttgccaaaggttcatttgttacagccgaatctgatgctgaggtcggttcagtttgcttcatggtatcagtcgctttgtttgagtcgccgtttccgcatgacgctaagcttagtatcattgcacacgctgccgttatgactaataatctttttacaaatttcatataattgcctcctttaattttgtacgagcacagtataacacgataaaatatttatgtcaatatagtttataaaaataaaaattacaacgatataacaatttttaagaaaaatgtcgaattatttcgtttgatatataaatgtttataataaaatatttgttcttaacaaatgcgtaaatatgattgacggaacaaaagttttattgtataataatagtataaaaggaaggtaatatattaaagggggcagtgttatgaaaaaggtattttttagctttttggggtttgcagcaatggtttgtcttatttgcggaacagtgtttgctgattataacaatgtaactatttatgtaaatgataaagttgttcagtcttcgcaaccgggcgtagttataaatgatactacttttgttccggtaagaattgtctctgagacattggggtgcaatgttgaatggaacgaggcagaacaatgcgttactattactaaagaaaatataattttaaatatgactattggaagcgtcaatgttacggatggaacagatgcagtataccatcttcctgaagctccttttgttttaaatgacagcgtgacaatggtcccggttagatttgtatctgagaagctgggaatgagtgtgaaatgggacgagacttccaccacagtttttattaacagtgattcatcttatagtaatataacaaacttaccggtttactataaagcgtcgtttgaggataagctaactaatattattaattataattttaacggtgatttttatcaggcacaagctataattggtttggtgacagatagtgaaatagaatccgcaagaattataaatcctattggtcttgctgagttttatactcaaaaagaaacaactgagcgaaatatccaactgatggctaatggactgcctaacgagattgaacagcagctggctgatacaagagcatatcttgataatgctataaatttgtataatcagggactgtattatgaggcggctgacgctttgagtgatttttatttgtacagaactactccggcgttggttgacgaatataaccaacttgtttcagatattaaggaacaaattaattatttgccttaccgtactctaaatgatattagaaaaatggtggaaaacggtgactattatggagcttatgccagagtgaacgctttccttgagcaagagaatctaagcgatgacgtgcgcaataccgctgaaatacttaggggagaaattgaggatgagattgcagcgtatgagcgttctcaagaggttgtcggatatagatatgttacaaatgtggcgaatgcagtaaatttcaggcagaaaccaagcgcatcatcaacaattataactaccattccttatggaacacggataggatatgttgaggatgcaaacagcgaatatgctcgtgtaaaatatgacaatatgtatggatatgtagctaagttttacttgtcgaattattctccgccgaaacaatattccgctgtcaggtatgtttggcgttccggcgctgtagagatgcttgaccagccaagaagcggagcaggcattattctaactcttgcggctgagacgcctgttggtcttgtggagattgtttctgatacctatgccagggtagattatgatggaaatcagggatatataagaagagatcagttggtgctttctgttcagtaaaataaattttgaagttaattattttatattataatattgtaaatacgtctcttttatggagacgtattttttgtataattgacatttaatcattgaaggagtataattcaggaaaagagttggctggtataaatgcggaggtaagtaatggtaaaatcgataactgaaaaatgcagcgccaaaataaatattgcaatagatgttcttggaaaatatccgaatgactatcatgaagttagaatgataatgactcaggttggtatttttgatgtgataaccatatctttaaaagatgagaaggggatagaaattgccggaagtgatataaatatgcccgttgatgagagcaatttagcatggaaagctgccaatgagttttttaaagccataaagtttgatggcggctgtgatatatatatagaaaagcatataccaatgggagccggaatggcaggaggcagttccgatgccgcaggagttataaacgggttaaataagctttttgattctccgttatctttggaagaaagaatgaaaatgggtaaaaagcttggcgctgacgttccgttctgtgttatgggaggctgtgctttggctgagggcattggtgaaagattgacggttttgcccgaacttcctgaagtttgttatttgatagccaaaccgagacagagtatttcaacaaagtgggtctatgagcatcttgattataataataagcctgtaaatttggatattgacaaaattatttccggtataaagtctggagatttgaaaaagattcaaccatttatgggaaatatacttgagaattcggcggtacagatttgtccgcaggttaatgtatataaagctgaaatgctgaatttgggagctgatattgccatgatgagcggaagcggaagtgctgtttttggaatgtttgatgatagggaattggcagtaaaggcatataaggagtttaaattaagacatagtgatgctgatggagtttgggttctagcttagaaaagaggagaagaaatgaaaattaatggagtgaaagcaatttattttagcgctacgggtaatacaaaaagggttattgagttgttctgcaaggcttttggtgagccggctgaatatttggatgtaaccgacaacgaggaatatggttgtgagattgacaaaaatacattagcagttattggagttccgtcatttggaggaagggttccggctattgccgccgaaagaattaaaaatattaggggaaataatactcctgcatttattttaactacatatggaaacagggcttatgatgatactttaactgagctgagaagcattgctgaaaacaacggatttgttgttgcaggagcggcttccatagtttcaaggcattctatagttactgatatagcggctgacagacctgatagtaaagatattaaagaaataaaagattatgcgaaagagtttaaaaacaaacttttaaattcacataatataattgggataaaaaatatacccggaaatgagaagttccgtgattttggcggggttccattttcacctcagccaactaaacaatgcgtatcttgcggtatatgtgctgaaaaatgtccggttggagctataggaaaagattataaagcagattcgaaaaagtgtattgcctgtatgagatgcgtttctgtttgccctaacggagccagagctgtttccaagcttgctttaaagatggtgtctttaaaacttcataaggtttgcgccgacagaaaagagaacgaactttttatataaaaagtaaaaatatatcaagatttattgcatattatttgcaaattttgaatatattttacgtttacagaacatgtttttctgtggtataatattaaaatgtaagagacacggagtgccgtgtctattttcttgttagaaggagtaaattttatggtaagagaagatttgagaaatattgcgataatagcacacgttgaccatggtaagacgacgctagttgatgaaatgctgaaacagggcggagtttatagagagaaccaggtcgttgaggaacgcgttatggataacaacgatttggaacgtgaacgcggtatcactatacttgctaaaaacacgtctgtatattacgacggtataaagatgaatataattgatacgccgggtcacgctgatttcagcggagaggttgagcgtattctgaagatggtaaacggtgttattttgcttgttgacgctgctgaaggtcctatgcctcaaacgagatttgtgcttcaaaaggctcttgaaatgaaccatcgtgttattgttgtggttaataaaatagatagagccgacgccagacttgatgaaatccctgatgaaattcttgatcttcttatagagcttgacgccaatgacgaacagttggaaagtcccatacttttctgttcaggcagggcaggaaccgcttcgctttcccagtatgaagagggaaaagaccttaaggtgctgtttgaaacaataaaagattatatcccggcgcctgagggagatgctgatggccctatgcaaatgctggtgtcttcaatagattataatgattatgtgggcagaatcggaatcggcagaattgagagaggctgtgtaaaacagaatcaggaagttatggtatctgaatatcataataaccatgaaccttataaggcaaaaatggtcaatctttatcagatagacggtcttaacagaactgctgttgatgaggcaaaagttggggatattatatgtttttcgggtattcctgaaataactatcggagatacgatagcttcacctgaagacccggctcctcttccgtttgtgaagataagcgagcctactattgagatgacgttttctgtaaatgacagtccgtttgcaggcagagagggtaagtttgtaacttcacgccagctgcgcgaccgtttgatgagagaacttttaaaggatgtttcattgagggtaactgaaggagagtcaacagacagttttaatgttgccggcagaggcgaaatgcacatttctatattgattgaaactatgcgccgtgagggatatgagttttcagtcggaactccaagagttctgtataaggaagtcgacggagtaaaatgtgaacctatagaaagacttattattgatgttcctgaagagagcgtaggcgcggtaatggataaaatcggacagcgtaaaggcgaaatggtttcgatgactcctcagggcggaagaatgaaacttgaatatttaatacctgcccgcgggttgctgggatacagaaatgagtttttaactgatacaaagggcgagggtatactgaactcagtcttttatgagtatcagccatataagggtgagataagcagcaggcacactggttctttggtggcgtttgagaccggtgaagccgtaggatacggtttgtttaaggttcaggacagaggctcgctgtttattactccgggaactaaagtatacgagggtatggttgttggaataaaccctaaagcggaggatatgaacgttaatgtttgtaagaaaaaacagctgacaaatacccgtgcttccggaagcgatgacgctcttaaactggttccgcccgttcagatgagccttgaggcttgcttagagtttttggcggaggatgaacttcttgaagttacacctgaaagtttaagaatcagaaaaaagatattgaataatcagcttcgtgccaaagctagaaataagaattaatttaacaaaacgtccggtgacattaagtattaaaaaagacgattttaaaatgatataataaaaagatgacgaacacaaaaggtgtttgccattttttatcaaaatataaaacgatataaatgttgtttaaatataaaagcttaataaaaaccgcacgttccttattaactggaataagcggtttttatttttatatatcaacttactgtataattttttaaaagaattttatataatgtatcttatagaaacaatgatttttggcattctccgaaaactatatcaacctgcattgaaataaataaacctttgatgctcatccgcaatatgataattctctttccaagaactgcttaatatatggattgttttcttcgcttaaaacgggcataaaagccatataacggcatttttgatattgctcgccgtccagttcaaaagaataaccggttacacattttggattgcaatcatcaggattgagcagtcgtttacagacagacgccttccgtatatcctttttcattttctcaggaagtgtgtttaaaaagtcttggtaattatttaggtgttcaggataaattctaatcttcataccggttttgcgggttacaaagttagctaaagtcctttttggtttgtttaaaatataggaaacaacatatccgcttttagcttcttttatgtcacacttacatccttgttctgttaaatagttgtttatttgggttacaaaatcttgaaagcgctcatcaaccgtttcaagaaataacataaattgattatccatagtttaactccttattttttagttataagtatctatactttatattgggcgtttttctcggggcatggttcaaatatacttcaattgtttaatctttctattcagtccttttctctccttttcaatgataattataatatttgctgcaatggttgtcctctctttatctgcacgaaaaagagaggtaatattttatataagttcatatattattttctggtatcaggataatattaatcagttttccgttcaaaggttgaatttataaggcagataaaagatgtgattatcactctctgttatttttcttgtaaagaaaatttgaagcgtaatataaaatggtttataaaagcggcatatttttcgtgagaaaatgggctgccaacgatttgacagtataaaaaagaaccgcctataatttattatatcataagcggtcttttgtgtcattgttaatttttactttttttgtttgaattgctgataatgttattaattattaataagtgagtgctcttatcctattttataatttgtataaacatctataagattggaaaattattatataagctggtcagccagtttataaatcatcgtttcggtatctttccagcccaaacaagggtctgtaatagattttccataaatgctgttttctcctatcttttgattaccctcttcgatgtagctttcaaccataaagccttttatcattttcctaagaagcggttcgtacgccatactgtgcataacttctgaggctatccgaggctgctgattaaactgttttgcagaattattatgattggtatcaataattacagcagggttttcaaaacctttctcatcatactcgctggctattctaagcaggtcttcataatgatagtttggtatgtttctgccgcgttcgtctattccgcctctgaggatagcgtgagcgtatggattcccatttgtagtcacctcatggttttggtatatgaagtcatgaccatgctgcgcagcataaattgcgttaaacataactccggtatcgccgccggtaccgtttttcataccgatgggcatatcaagtccgctggcaacaagtctatgctgttggttttcaactgagcgggctcctacggcaacatatcctaaaagatcgtctagatatgggtggttgcccggatagagcatttcatcagcagatacaaaacctgtctctctaagaactctaaggtgcatttgacgtatcgcttttataccttcaaaagcgttgggcgcttcattagggtcgggctggtgcatcatgcctttataaccctctccggtggttctgggtttattggtgtatactcttggcaccaaaagaattttatcattcacttcattctgaacagaggcgagccgtgatatgtagtcgcagacagaatcttcgttgtcagccgagcacggacctattataagaagtattctgttgtctttgccggacaaaacggcttctatttctcttatgcgtttaatacggatttctgcgctgtcagacggtaccggtaaaagttctttcaagtgttccgctgaaggcatttcttttttaaatgtaaaactcatataaaaactccttttatttacaaaaaaagcccgaaattttcatttcaggctatttattggcaggggtagtaagatttgaactcacggcacgcggttttggagaccgctgctctaccaactgagctatacccctaaattcaactttgacattataacatgattttttttatatgtcaagcctgaattttaaattttgcttattatattagttaacgccatattaattaacgtcgtcctcaaaataccataacatgctataatattttttgtgtcttatattgtaattttatgaatatcatggtataatgataaaatgctttataattttataacataagaaatagattagagggttatttaattaaagtaaattaaatttctgtcagaggtgtaattatgaaaaagttaaaaagtatcgtattactgctcgtttttgctattgtgataactggatccggatatgctgagtcaatcggtgctgatgttatatacagcggcgggattgtagctgaacagaccggcgcatatcaggattaccttaaaaatccatcggcttatacagtcattcctgagcctgtggaatttggaaaaagcgaatcttctgcttatcttgaagaggttatgcctgaaaagtataatactgaaacggatgcaggaaaagacaagaaagacttccctgcggtaagggaccaaaatattgacggtgactgctgggcgtttgcaaatactgctgcccaggaatattctaatgttgttcttaacaacaagagctataagaatgataatgaaatactttcagaataccacatggcggctgcaatgaattataccaatgatgagggatataaaacttttacatgggataacaaaaccggcggtaatactgctatggcggttgcgtatatgtcgagggagaccggcggaggttctgtattattaaaggattttgataatagtaaatattcaaagtataccggggacagaacagattattcatctcttttgggtattgacagagccggaaagcttatttcgcaggagagtattacaaatttatacgagggcagttctgttcttgattatagttatgaagacggttctataaagaatattaagtatcataaaaatgaatcggttatcaacgcgataaaagccgggattatgaaatacggcgcggtggcagtgtcctatctttctaatgaaagccatgacggatattataattcgaaaaccggagcttattgcggaagctggagtgatttgcttaatgggacagctcctgataataacaaagttagcttttatcaaaatgacggttctataaaatataaatttaatacgcctactaatcacgcagtaacgctgataggctgggatgataattattcatacacaaactttaaaactaaaccttcatcttatgacggaaaaaattataattatgagaatggggcttggatagtaagaaacagctggggaagcgattgggccaatgatggatatgagtatatttcttatatggatccaactataggtttttcagcttccggttataagttttcagatgagactgatgagaatatttattcttatgattatgttggcttgatgggaagtattagtcttaagaatagttttggctgtacgtatcaggcaatacggtttgaaacgagcggcaaggaacctttaaaatctattggtttatatgcgttagatatggatgatacttttgaaataatggttgacagcagtcctaaagatacttcgctgccaatgaacctttcagaaagcgagtttaaaaataatagggtgaatttgaaagacccggataccggcgtaatttcaaaatcagtacaattttcttcacccgggtacaaggttttagatttagctgcccctattgatgttaatggaagcttttatatatatgttagacagtctaatgattcgaagacatccactgatgaatatagaatagccggatgtactaaaggcgttaatgcttcgtactatcagcctgagaaaaatgtatgtttttattcctcttcgaagaggggagatacaattaatggctggggtgatatatatttgagcggatataattggtgtattaaagcttataccggctcaaacagcttaaagccatccgcttctccattgccaaccgcatctccgactcaagagccaatagcgtctgaatcaccgagcccaacgtccgcccccacgaaagagccggtagtttcggattctccaagtccaacgtccgccccaacgcaggagccgatggtctcagagtccccgaatccaacttctgctccgacgcaggaacctatagtaacagattcgccaaccgtgaccccaacttttgctccggttgtttcgccaacggcagaaccaattgtgtctccttatcccgaaaagtttggagaaccggaaatcgtagtaaataaagctgaacagaccgtagatgtgactgtgacgcgagttgacgcaagctgtgaagacagtgctgtattagttgggatctataacagtaacggaattctggtaggatttagaaagataactcctgtgtttgatgaaaacggaacttttatgataagcggagttgaatacggcggattaaatgccaatacattaaaagtgtttatttggagcgatatgggagacataccatatcttgattctccacagagtgttgatttaaattaatataaagttttagataatagaaaggcctccattttttagtatggaggctttttgctgtatgtgttaaaaatattaagagttttatttaagtaaagagcgtatataaggatataataacatttatcagagatattttttaaacttttattatttagttgttttcgggttcatcgttcatacatatatcatacatttcgcctgtttttataagtgaaaactgaagtcttgcatcggcttcactgatttggtcgttacgtatctgctcaatcgctttttcaatatctttgcgcataacaaagtatgctcttttatagttaatcaaaatatcacctcaaactgttttaatgttacatattatgttattaagtataacatatattctgtgcttttgtcaacatataatttattatgaggtgataactagtgaaagaggataaattaaaaatatccaagagaaggctgaagggggacgatggatttaaagtcttttcggtaagactggaacaggagctcgttgacagaatagataatattgccgaatatacaaataggtcgagaaatgaattaattggtattttgcttagatatgctgtagaaaattgcgagataacagactaaacatctgcatttaagttattatattaagtacgcgtcttatttttaaacagtctaaattgtgcttgttgtacaatttgaagctgcttatttataagacgtgttttaatgtctgaattaaactttttaatttaatgtactttgcttttgatttggggaatttttggaaattttttatttattgatttgtgtatctgtcaaattgacaaagtgtaaaagttgtgatataatttacactcgtttcatataatattttagagtgagacaagatataaaatgtacataggaggaaacgtaatgaaaagatttgatttcagtatgaaactgatagttttagcggtttgtgccgtcattgcggttaacctgttctatacaccgaaaactgatatagtttctgctgaggacacagagatgaggggaatttgggtggcgtcggtcggaaatttggactatccgcagtcgcctactgctgatgcatggcagcttagagttcaaatggacgaggttctggacaactgtcaggacatgggatttaatacagtatttttacaggtaaggccgtcaggagacgctctttataagtcggatatatttccgtggtcgcgttatcttacaggaacacaggggacggctccgagcgacgggtttgaccctcttgaatatgctgttaacgaggcgcataagaggggaatgcagctgcatgcatggataaatccataccgagttaccaactcgtctaatgataatggcaaattggctgcaaataatccggctgtatcaagacctgacttggtgcttaccgacagttcgggcaagatgtatttgaacccgggcgaagctgattctatcgacattatacttgaaggaatcagagagattgtaagaaattatgatgtcgatggaattcacatggacgattatttttatcccagcagcggatttgacgattctgcggcctattttaagtatcaggacgcatatccaaacaaagcggactggcgcagaagtatggttactactttaatctcctgtgcccgtgacgcagtaaaggaaattaaaccaaactgtatgtttggagtaagtccgagcggtatttgggcgaatgccggcgacacgccgggaggcagcaatacaaatggaagcagttcatatcatagcttgtatgcggataccaaactgtgggttgaacgggaatatcttgattatataatgccgcagatatattggtataatggtcagccaaacgctgattataatactttaataaattggtgggcgggtgtttgcgccccgacaaatgttaagctttatattggcgaagcggcttataaggcggcttccggctctgaagctgcttggaaagggcagaatggtataaatgagctgtccaaccaggtttcaatgtgcaggcagagccagtatataggtggttacagcatgtttgagtattcttcgtttatgggaaattcaaatctgtataacctcataaaacagcttcattccacacctgccgcggctccgacgctgggagaaattaatcagcctaaccctcagcctgaggtaactcaggcacctgaggacaagccttccgagccaactcaggatccggcttcctctgacccgacaaacgctccgattgctgctgatcccacgagcgcaccaacaaacgtcggagacgcctcaaagtttactgatatgggtgaatatggctgggcaatgccgtatattgaagatcttgtaaaccagggaatagttaaaggcataagtgatacagagttcgggcccgatatatttatttcccgcgccgacgctacggttttgttatatagaatattaaaggaatcagatataactttcacagaaaactttgatgatgtatatcctgataaatactattatgatgaaataggacaagccaaagcaacaggggttgcatggggaattggaaataatctgtttgatcctgacggaactatgcagaggcaggatatggctacacttgcttatagagttttgaaagcccgtcaaattttgacggcaattccgaacacggcaaaggcgcttaataattattgggattggcgtgatattgacttttacgccagagacgctatagcggcgtgtgtagaaaacaaccttatgggtggatacggcgacggaactatccgtccaaaagatgacgctacaaggattgaggttgctctctttgtgcagagaataaaaactcttatagacagcaaataaaaacaataaggtatatagccgcggaaacatgtttcgttttccgcggcttaaaatttgttaaaaaccacaataaagactataagagacgagccaattaagattgatgtaataggcaatttttacaaaaaaacataaagatgtcagatacaaccttatttttgtgcgatttgacttgataaaattggaataataaggtacaataaataatggagctgtattagaaggatgaataatattataataatacagcgattatatgcacaggagggattttatttatggcaaacaatacttctaaggcagagacgcaagataaaacggcaaaaaatgttgctgagtatcatagacaattaaaacccggaacgcccgagtttgatatgaaaaaggactttataaaggatgagattaccggtaaggtgaaacgctattttggaaaaacaatagcaaaagcaggcgacatggaagtctaccgtgctgcagcgctcactatacgcgacgagataatggaaaagtgggtaagctatcaggaaaaatgtgagagaaagccgcagaaagagctttactatttatcttttgagtttctaatgggcagagctatgggaaacaatttgatgaatatcatggagacggaagtttataagagtgcattaaaagagctgggattttcgctggaaaatattgaagaggtagagactgacgcaggcttgggcaacggaggattgggtcgtttggcggcttgtttccttgattctctcaccaatttggatttgccggcctttggctgcggtataagatatgagtatggactgtttaagcaaaagatagttgacggatatcagatagagatgcctgacccgtggctgcagagcggaaatgtttgggatatagcaagacctgaggacactaaagaagttcattttaacggccgtattattgaaaagtgggaagacggccatatgaagtttgagcatgttgattataatactgtcatagcggaaccgtatgatatgcctatcacaggatttgatacagacacggttaacactttaagactttggaaagcctgctcgcctgagattatgaatatgacagagtttaacagaggagattatgctaaagccaatgaaaataaagatttggctgaagttatttcaaaagtgctttatcctgaggacaatcattatgaaggcaagcttttgagattgaagcagcagtatttctttgtatcagccacaatccagtggataatatccaaacataaacagaagaatttgtctatgtttgatattcctgagtatgtgcagattcatataaacgatacgcatcctaccatagctatacctgagcttatgagacttctgatggatgaagaagggatgtcgtgggacgacgcgtggagtatagtcggcagaactttcgcttatacaaatcataccattctgtgtgaagcgcttgaaaaatggccgatggacatggtggattcgctgcttccgagacttggtcagattattcatgagatagacaggcggcagagaatcgccctgaacgaacgtttccccggtgacacaggcaagattgagtatatggctgtaattagcagaggacaggtaagcatggcgaatttgtgcttgactgcctgccatagtgtgaacggcgtggcggctttgcatactgaaatactaaagaaagaaactttcaaggattattatagcatttatccgtataagtttaagaacatgactaacggagttacattcagaagatggctgtataaggcgaaccctgagctttcttcgcttatttgtgaagcgataggcgacggctgggtgaaagattatacacagctggaaaatctgcttccgtttgctgatgacaaagcgttcagagataaatttgcaaagattaagcttaataataaggagaaacttgcaaaatatatactggatcataatggtataactgtagatcctgcatctttatttgatgttcagataaagagactgcatgaatataaaagacagctgctcaaagcctttcatataatatataggtataaatctattaccgaaacacctgaaaatgcaaataagatgcccgagacatttatatttgctgcaaaggcagcaccgggctatcatatggcaaaactgataatcaagtttattaataatatagctaaggttgttaataatgaccccaggacaaaggatattttaaaagttgtatttattgaaaattacagcgtatctattgctgaaaagattgttgcagctgctaacttgagcgagcaaatttcaacagccagcaaggaagcttcaggaacaggaaatatgaagcttatgctgaacggcgctttgacaataggaacaatggacggtgcaaacgttgaaatacgggagcaggttggcgatgataatatattcatttttggaatgcagtcagatgaagttttaggactatattcgacaaaccgctcgccgagccctgaattgtatgctacaaatatggggattaagagcattgtcgacacactgatagacgggacgttctccggagatgagcataatctgttttatgatatatataggtctttggttcagggaaataacggcagttttgcagacccatatttgcttttgcctgattttgaatcgtatgttcacacttgccagcaggcaaatagtttatataaagataatcaggatgaatggaacagaaaagctgtaataaacacggcaaaagccggattcttcagcagtgacaggacaattgaaagttataataaagaaatttggcatttgagataaaaataaataattaagcccatggcatttgtcatgggcttttgtttaatatataaagaaaagtgatatttgctgatattatgcagtttgccttagtagttaattagtttattttgtattagtgaatttaacacttatagaagttaatatataagtgaatttttttcacttatatttaatataaatattacaccgcattgttttgtgaactaatatttatttatttttgttttttattttatattccaataaaaagcgtaatatttatatatttattatattatcatttatttatcaaaaatatatgttcgaaataaaaattgttaataatttagccacaaaagtattgcgcttttgttacaaatatgctataatgtaaacattaaatgtattatatttacagcatatttgagttacggtacatatatattgtgtatcggttgttgtgtttatgtttttagatacaacaggtagtaattacatatgtaaaaaaaattaaatatataggaattttatattccaaaaaacacaaggaggggttttttaatgagaacctttaagagaagtttggccttagtattggccatcgctatggttttgaccacctttggtatgaccgttgtttcagcggctcagtacaatgatactgaaggtcattgggctgagagttatatcaacacttggtctggctatggcgtaatccagggcgacggcggttatttcagacctgacgacgctattacgcgtgcagaagttgcacaggtaaccgataatgttatcagttatgaaaaaattgctgataatatgttcacagacgtatcaactacagactggtttgctgacgcagtattaaagctggttgccgctggtactctcacaggtaacggtgacggaacgatgactccgaataactacatgacccgtgaagaggctatgacaatgcttgcgcgtgcgtatggtcttacagttgagaatactcaggcaggcattacccagtatgctgactatcagaacatttctgactacgctacaggttatgttggagctatgaccgctgccggatatgtaggcggatatgaagacggaacaattcgtcctaaggattatatctccagagcagagttcgttaagattattgataatatgattaaactttacataacagagcctggttcatacggtccagaatatgttggcggtatagttatgataaagacaggcggcgttacccttaacggaatcgttgcaggcggcgttgttgtatcacctcaggtgagcggcgatgttactataacaggttcacagatttcaggggatatcgttaatctctctgaaaaagcaaacgttacatcaaacacaggtaatgttacaaacccaagcgcaaccacaaagcctaacaatattgttataggcggcggtggcagcggcggtggcggtaacggcggcggacccgcatcgcttactgttaaattccattacggcgaaaattatggaactgttaagactaagagtgtaacaaaaggcaagaagttgtcagaaagttctgttcctacaccgaccgaaagcaattgggacggtctttggtacacatctaagtcagcagcagagaaatgcagcggaactacattcgatccgactgtttcagctgttaacaagaattatgatttgtatgcaggacatattaataactatgatctgaaagacgttgaaatagctgttgataataagactgattatgttaacgtttatgttggagatgttttaacagctacgaatcttgctccggcagctgctaagaattatgtatcatatcaatggtatagaacaaaagaaagcaatggaacaggagacaagatttccggagcaacaaagagtacatatacagctgtagaagccgataagggtatgtatctaaaagttgtagttacaggtgatggaacaaactataatggaactgtatctgatgtttcaactatagttttggcaaaagacgctccttctatctatcctgaaaagacaacagcagcatttggaaatgacgcagcaacaactgtaactctgacagagggtcagacaattactggagttaagactgagagcggagaaatgcttacagctgatcagtatacttttgatgctgaaacaggaaaactcacaatctcaaaggattatcttgcaggattgacagacggacaaaatgtattcacaattgtagtatctgatgatgctgcttataatgtaacatttgttgttacaacaacaggcggccctacagaaggaccggttcctacagaagagcctgagccgacagcaacaccggtaacaccggataagccgacagcaacaccggtaacaccggataaaccaacagcaacaccggtaacaccggataagccgacagcaacaccggtaacaccggataagccaacagcaacaccggtaacgccggataagccaacagcaacaccggtaacaccggataagccgacagcaacaccggtaacaccggatgagccgacagcaacaccattaccaacagcaaccgtagcaccgattcagaagtatgtagcaacggttaacgtaacaggtggtaaagctgtacttaaggatgcgaacggaaatacttatcctttagtagaagtttctaatcctacagaagaacctgttccgacagcaacagcttcaacagaggagccaacagaagccccggcaacagcaaaaccgacaatgccgccgcttacagagattacagaaagctacacatttatagcagatgatttcaattcagcaggaactttgccgatcagcgaaggtacaatgcttgataacggaaaagtatattcaccagctggaaacaatgctgcgacaaacaagaaatcttcagaaattaatggagctagtcatcttaattcaatgcgtctgaagggcgctcagaactcattggtatttaaaacagccgttgacgttgcggtaactgtatatggaaatgctcatgattccagagtatatgcagcaggcacaacaaacggcggagttgaattgggtaaaggccaaacaggaagcggagtatttacatttaatgcaagtgctggaaccactgtatatttgacagctgttaacgacgctgacaattcgggcggagacttgtttatagcaggatttactgtagagcctacagccaatgcagcggctgaagatggtgcggttcaatatttaatcccggaaggcgatgtagtaacagtagacgcaacacctgatacagcaggtttgtatccgatagtaacagttaagggtgcagacggacaggacatcgcggtaagcgataacaagttcacaatgccgggacagaatgtaacaacggaagtaacattcggtgacgcaccggcaacagcaacaccggctccaacagctactgtttcaccggaaccgacagccacagcaacagttgctcctccgactgctacacctgtattcccaagctatgctaactggaatatcggtcaagcaaaaatcgataccacagatggcgcggcagcagaagtagtatatcctgctgaaggcggaaaagcagctatcgaagtaacgagcagaaatatttacacaactttggatcaggaagtctcagcaggtcaggctaatgtttcattagatgtatatattgacccggcagttccaaagaactttagaatttatttagagagcggaacagagaactatcagaatcctaatggtgaatatgtatttgcagaagtagcaaataacaacaatttatctgtaaattatggacctaatccggcagaagaaaataagctgtttgattatagtcaaatgacagccggctggtataagtttaatatcactctcgactatgaaggaacagactttattactttagaagttaaagctccggatggtacagtagcaggtacagcaaagatgggcgcaattgcaggtaagtctacagctttaagacaggttcgtcttatacagacagctgcagccgcacaatttgcagatatggctataaccgtatcaggtcagccgacagctaccccggctccttctacaccaagtccgacagcggttccggtatcttcaatagtagttcctgctaatgatttgactttagacggcggggcagtgcttagcgataacgctggtcaaaattatacatggactgaaaaagcaacagatgagatgaaatcaacatttggcgatccaatcgatagcgttaacacagcaaagtttgctttaatgaacggcgatggaagaaatgtatctaagacaatcaatattccggctgacggcgaatataagctgatggttatgagtattgaatataataacagatactttacagcgagtgttgataatggcgctgcaattgaacccgagagtcaaactccaggtaagatggcaacaaataatgcaggtggaagcaatgttgatttgactgtgacagaatataatttaggcactttaacaaatggagaacatacagttaaggtaacatctgcagctaataacagcagaaatattttggctatagctgtagttccggttgctgcaccggcaacacctgatccgtcagcaacaccggaaccaaataagtatattgcaacagttaacgtaacaggcggaacagcagttcttaaggatgcagaaggaaatgtttatcctacatatgcacctgaagctacagtagcaccaaccgtagaaccaacagcagaaccgtcagacgctcctacagctgagccgtcagatgctccgactgatgagcctgctgctacagcaacaacagctcctgttacacctgtaacatataaatatacatcaacctcagaaattaagggtggaaatttgtgcgaaggcgatacatgcacatttgttgatgaagcaagtgaagagattagaactttatttgcggatggaagcgatgctgctaaagtagctcctgcattaacagctaactataagaattatgtaggtggaacaggcagtaaggcatcacagccatacattgaaggaataaacttagagccgggtacgtacaacgtttattatttgggctataacaacgaagttgcaattgatgctactattggagacataagtttctcaatccctgcagccagcggagttccggtagctagggaagataataatgcatctcgtgtattaaaggcatataagtttacatttactgcagaaacagctttaacaaacgctacattaacatttaacacaacagaacaatggttgccggatatattctcagttattttgacaaatacaacagttgcagctaacgctgctggtgttgatggtgcagttcagtatctgattccggaaggcgatgtagtaaaagttgacgcaacagctgaaactgccggtcaggttgcatcagttacagtaacgggtgcagacggacaggacgttaaagttgagaataacaagttcacaatgccaggacagaatgtaacagcagacataacatttgctgaagcacctgcaacagcaacaccggaagcaacagcagctcctacagctaaacctgcggaagttatgattgccggtgatatgactctcaacggcagcgcaaaagtttataatgacgcaccaaaagagccgacagctgcttacactgaggaatattcgaatatctttggtgaaaacttctctaaggctggaacaagcaaagttggattccttggttcaaactttggcggatatgtaacaaagaattacacaatcgatgagaccggatcatataaagcatatattatggtatcatatgcacagaacaataaccagtttgcgttaagcaaggatggtacacaggttgttcagggaacattggttgacaagagtgaaaaggtaggaacaaacggtcaggatttgtttatctatacatatgatatagataacttagaagccggaacatatgaatttaagtactattcagaacttggtcagtgttcagacttcgtagctgctgctatagttgccgctgaagcacctgcaacagcaacacctgcacctgcaacagaaacaccggctccagctacagcaacacctgaagctacagaagcgccgacaccggacccatcagctacacctagtgtaagatatacatatacaaagggtgcaacaacaaacggttcatttgacgttcagaatgtatctcatccggagttagttacaaaaacagctgacacagctaataaagttaagtggacagcaaaaaatgacctagcaaaatttgagaatatagtagatcctgagccaattaccgtaggtgatattacaattgatcctcttaataatgctacaggcggagcgtcagatttctggaagcataacacagatacagttgacggtatcagcggaaatggtaatcctcgtccgtcttcgttggctggttctccttcagataaggacttgccgacaaatggaacagttttaaaacttacatctgcaaagagcggtcaggcagtagttaactatatgactaatgcaggtaagatatttacagttattgaagctaaacagggcgaaacaaccggatcatacttatatcaggtaacagctccgtcaaaagctgcatatacatctgatcctattgagatgaaggttggatacgattattatgtattcgttccggcttctaagattgcagttggatatatcgagtttacaccatatattgaaactaccgaggcatttgccggtgatacaattaaagtattgccatctgcaaacgatggatattcagtagacgaagtaagttatacacctgaaaacggaaataaaactgttgtttctcaaaatgcagaaggttatacatttagtatgccggaagcaaatgtggagataaatgttgcattcaaagaaggcgcagagccaagtgaaacaccggctcctacagcaacagctgcacctgcaacagaaacaccggagccaacagaggcgccagcaacagaaactcctgttccaagtgcaacagcaactccaacagaggcacctgcaacagaaacaccggcgcctacagatgcacctgtatcaacaatagctccaataccagcaaagggaatgactttacctagcggagttaatacaacagataagtcaagtaagatatataattggaatgataaagcaacagatgaaatgaaggcagtatttggtgatcctttaacaggagttaatactgaagctttagttccaatgggtgctgcagacagaactatttcagcaaaaataaatgtttcagcagaacaggctggaagttataagttaatggttttgggtatcgaatacagtaacagatactataatgtaaaggttgattcaggaaatgcgattgcacctgagaatacgaatccaggtaaggtagcattgatagacccgacagaaagtaattcagacttaacaatcacgacttacgatttgggtgaacttacagagggtgaacatacaatttctgtaatttcagctgcaaacaacagcagagatttctttgcaatgggttttgtaaaatatacaccggctccggcaaccgagacaccggctccaactgaggagccggcaacggctactcctgaaccgagtgcaacagcagaacctacagaagcaccagcaacagaaactccggcaccatcagcaacagctatgccgattgacgactatatcaaagctaatcttgatgatgttaatagtcagttagtagacggagacgttcaatatgcacaattggtacctaactatgataacagtactgttgatgtagaagttcttgacggaacaataaaaaatatgagcgttgtaaaatctattgaagcagctataggtctcgtaaataagtatgacccggttgcaaagtatgctgttcattatgatggttctgattatgcaacagtaagcgctgcaaatgaagcagcaacaaactttgatacggttgataacagaccggatggttataagaactacaatcctgtaacagtattcggaaaagacgattctccttcagctattgctataggaaaagcggtatcagcttcacttggattaaatacagaacagtttaatagcatttcaacaacagaccttgctacattcttgggatatcttgaagcaaattcaaaatattctgtaaatgtaacagcttatggtgcagatggaaactcaatcttcacatataagtttacctttgctgacaaacaaccagctccatctgcaacagcagagccgactgcagagccgacagtaactcctacagcaacacctttggtggtaacagcggatgaaatgacgctgttcggtcaggttagcaggtcaagttttacatcttttagcgatccaacggagtactatactgaggaatacagcagtttgttcggacagaactttgagaaagcaggaacaagtaaaatagcatttaatgcaggctctggtgctagttgcagctatgaattcagcataagcgaagcgggttcatatgtattctattttatgggcgcaactaatcttggagagggaggcaaatttactctcacaaggggcagcactacaatagttgatggaaaagatttagttaacagccaagtttttgggaaactaaacgaacaaaatagttctaaagatatattaatagctaagtatcagtttaatgatcttgaagaaggaaattataaaatcactatgcggcctactgctggttcatggggaggaacgttaaataaccgtgattttgtcgcattggcaatagccaagactgagactcctcagacaacggcaacacctgagccaacggcagaaccaactgaggctcctactgcagagccaacagcagaaccaactgaggctcctacaatggcgccggtaacaattgtaacagctgaatctggaatgagcacatcaaacggcggaaaaacagctgatgtggctttcaaggatataacagctgactatacaggggtttatccagtaatatttggtgagaacctttcaaaagccggagctaagaaaatgggattcctcggcggctcaagccataattacacaacaatgagttatgagattcctgaagacggattatacaaagtatatatgcttgtttacaatcctaataatggaaatagtatgtcattaacaaagagtggttcttctactccggcttttgacgctcatcttatagacatgagtccacagctggcgtcagcaagtgatggttatgctattaaggctctgacatatacagttgcattaactgcaggaacttatacagcaaagtattacagaactgatacatctttctgttcagaccctatagcttttgctatagcaccggtaagcgaagctgcagctaacgcagcaacagttaatgttacagatgtagccggcgcatcagctgagttacttgattctaacggtatagcttatgaaggtgatattccggaaggtgatgtagtagaaataaaaacatcagatgtaacaggatatgcagtaagcgtatcggttactgccggaggaattcagattcctttgactgcagataataagtttataatgccaaaccaggctgttacagttgatgtagtttataatgctttacgtagtgtaagcgtttcagctacaggcggcagtgtagaactttataatgctgctgataattctgtaatagatccagctaattataacagtattccagaaggaactgttataggtattacagctacaccagatgtcgctgaacaagttgcagagattacagttgttggagcaacacttgacacagataagaatttgtttactgttggagacagcaatgttgaagtaactgttgagtttgttacaccaacaaagtataatgttaatttggatgcttatacaaacggaagtgtttcatcagataaagcaaccgcagcagagggtgaaaaagtaactcttacagttactccgaacagcggatacgtaactcaggaagtatatgtggttgatgaaacacaagctgcagaaacaattacatcaacggatattacaaaatatacgtttacaatgcctgcatatgatgttactataggagcaatatttgctcaggttactgggtatgttgagtatttgtttgatggttcgcacaatacgtctattaattcaacaactgcaccggctataacatatcaaggtggtacacatcctactccggtatttacattgacaaatacatctaaaagctatggagtagcaacggctcttgatattaaggggaaacttcctcttagcggaacaagcataagctggaacaagaaagcatctaagggttcaaatggagcaggatattttattgatttgggtctcgtagattcttatgcagatcagaattgtcagatattcacaatgttgtcgccaaactctgttgctgatacaacaatagcaaaacttgagggtgcaaatgcaggcaagtttggtactattacggcagcggcagcaatggctgaaggcgtattcagaggaattgacgcttctgatgcacaggctgatggtacaattaaattgacatatggcaataagcaaggtctggtatattatatagcaattgcttattatacgccggttgttcagtaatctactaccagtaaatttaagtttttaattaatcaagggactgcaaatgcagtcccttgatttttatattattgttattttaaaacataatattctactagatattcagttcaaaactaaaaaatttttttattctttaataccccatagcgttttgaagcataagctggttaattcgttcttctgttaaacggttgttcagtctttcagaatttaactggttattaataatttggttgtaatactgcatatatatttgtttcattacattatccattctggaatcctctatatccaaattattttgtgttgattcctgaccgttgagtacctcgttccagttataatcctgagaattattggcttctgtccagcgataatcttgttcatttttgtcatatttttgttggttaaaaagtgtgttccaataattttcatatgccgctttgtctcggtctgtatttgaagcgagaactgagttgatattagaaatagttttgttgttggctccatatgcgttgctgtaggctgagttgtaggtgtccagcatgttttctaataagtttatgtccgtgttatagctgtccgcataacgttcatatgcctgctgtgcaagctccggcaccatttcgccaagtttgctcatatagtattgattggtttgcgctgccgcagtggctgcagcagaatttccatatcctccggtaagccctgcataattcgccatagcgtcttgacttgctctattaccctcagtgaggtatttttctttataagcttgataaaccggatcatcgtcagggtcatactcaaagtcttttcggttcattatagacctgctcaggtttgtgattgaatttaaatagcggttgttgtactcatctaatatttcgtttggagttgagaccccaagggtgttaaagtaatctgatgttaggtcctcaatatcgttttgatacgcccatgcctttccgttttcatctgtatataaggtgttcagcggtcttccccctatagtggccgagccgttactgtaacctaacacgtctgctgataccccgtattgtccggcatattttgaatatgcgtctgagacctgtactattggattattagacttggagtaatagcttaccagactgttttgtatttcagacggactggcgtatgaaacccctgcgtcttcatccatatatgacggcttcatcagagttcggccgcccaaggtgacggttccgctcctgtcgtcatagccaatcaggtcattgcttatccccatgttggttagtgtggagcggattccgacagtaccgtcctccctggacggtactgtctgtttctttgaaagggagggggatttgtttgctgccgccaatttgttatctgtgatatatttatctgatgtgtttggcatttgttatacctcctgtgtatgtgattatctctatgtcgtgcactgccgcctgacctgtgccctcaagcattatgcgaaaactgtcgcattttttaaatctaaccggcactttgtgaaccataaaaccattgccttgaatctcaccgcaaaacttaaaatcctcattgtcccaggctgagtatattttaactttggagcctgattttaaatccaggcggagatatactgtgtttattcccttgaaatcaaaatcatcaagggtgaattttttggataccacacaccagtttatctcttcatcgctctctcctgaaaatttatacatatcggttttagtaacgccgtaaagatgttcgttatagcgaacaaagtcaatgaattccgtgttgtcctctttatgccaaagactataaagagggtcatatactaaaagatcgttaccatttgagtttctggcgcacgcatagtaacgctgtccgtcggttccgcttttgcaagtgaaatagttggtttttatacaactgctgattttctcaggttcaccgccgctgtactcataaaagccgtcggctcccatatagtaaagtatgccgccgagttcagcaatactttttccgtctattgcaccgccgcaggtttgcttgggtatagaaaaattttgcggcgagtctccgtagatgtggtgtatatagttgctcttaaaagcgacgactgctgttctgtagctgactatacctgtaaactcgccggcagtgccgatttcactgtaccagctgtcatctgctagacccataaaggaattaaaattgaaacaatcgcctagtttggacgcatatatgtattcgccgctggttcctgttccaaacagacggttattatgaacgcatgcccagctgatatcaggaatacttatttcaatagtcacagaattgctgtcagtagtgtttttgaatagcccgtaactgccgtttttagtatataaaagaagtgaaagtttagatgttgtggcctcgtcaactaccgcactgactatttggctgtcagaagcataatctttttttgagtttattacatgggtgttgttttggtcttcactgcagccgcttatgattacactgtctcctaccttaaaaatgtcgtcaaattccgcgccgcttttttgtatataagcagtatatactccgcttatttcgttatgacttgagtaaaattttgcgtctgtaacagcaatctgacgtcccatcttttttaactcattccctatttctccggtgtcagggtcaggaagatacctatagtacaccttgtcagggaaaatacatatgttcccattaaagtccactatagatttttcaccgtccaagagcttaatgtttgtgacagagctgcccttgtagtaaaaatagttttctgctacccctgtgaatgagtcaagacttcccggctggtattccggagccgtaaccgctgatattccgtttaaagaaacaatgtgttctctcggtttacgcggcgaggcggcaggaatagaatcggaggacatattatacatttcagacatttgtctgtcgtcaattttttctctttgatcatatccaaagaagtttaaaatatccactttttttgtgttgctgcttgtggacgaaccgcatggcggcagatacatattcctcacctcctaccagaaatttttgaaccttgccaaatcgttcaagggatttctggttttataatcttttttgtattcgctgtacaaattgttgtattgggtcatatgggcagaatacgcgtcgtaatcatgctgatagagcgccatttttgctaaaatatattctatatacagtctgtcatatggagggtctgcctctgtttcgtcgtctatgacgcgccgaattgccaaatgtgccgaggtttgcggagtaaatatatcatctgtaagatagactgcttcaccgtcattttgatatacatagctatccaggcaggagtcccagttgggttcatcatctaagttttcgagaagtacgcattctatgttgtccccctcaaaaagtggaagttcagagccgaatatgatattctcacttagtttataagtaccttttacctcaatgtttctgatgttatcaggcttggtgagatacactagtttaagtattttaggagctgaattgctgaatgctgaggtcagtgaaccgcatagatgaggcaggcttcttaaatctgctttatctattaacttacctgccacatacgcagcttcaatatcgtcaatagaaatatcatcaggcagctcaaattcatcagggcatgttactaaagtttcaataacggagtaatatttttttatgtcccgtcttaaagcgagtgaaacttcgtcgcaccagtgcagcttttcactgaaagtaaattgattagggctgagagcgtctgcagctgaaattgcgtttatgattttcatgtatccacctgccctctaagcctctttaaggctttcaatatatttttcagcctcaatttcctgtttattacttctttcaatggcgagagcaacacttctaggaaccattacttcaacgccgcgtttaatttgataattggttccgttaacggtaacggtcaaatcgtcttttttcttccagttatctttaattaatgtcacagggacaggttcattataaaattgttcaagttcatctgtaacagtttgttttgtatttgccatgtttacctcctaatagctgcaagttgtttctactctaaccataaactccggagagagtatttctgctgtctgagttgctttccatccgacagtgcttctctggtcgagagggtctccggttcctgcgcttcccttttgtttgattattgtctcaaggccgccgcctgttatattagtaaccccataagcattctgaccaataaatagagtagagtatacgtccctgccatcctttccggctcctgccggatatatagttgttccagaaacaatagtagcgcttggagtttcggacagggtgatgcttgcgcttccggcgcttcccgctgccgctgaggtgatagagtagtcaaatccgtttatctgtacagctttgccggacagagcagcagcgtcctttgcggctatttcttctgaaacagtaatggttttaccgttaacctttgcaacagtaaggctttcagggtctccggtctcgatgttttcaacggttctgagcggagctgccctgaatattttagcttctgtggactcaacgaatacaacgccatgaattttgcctattgtgccgttgtaccagtcttttgggtcaacattctgctttatttctttccagtccgggtcgtttgtcaaatcgttggcaacatcagggtggattatagccacgtaacagccgtctttcattggctgagcgttgtttcgtttcagtgttgctacagctcttttaacagccgccacatttaaataatcgttatcctcatagttttcagcaccgcctaccagcagatttcggtcagacttgccgtttccgtactgcacgttggttccggcatttaccttttctcttattactgtgtcaagagttcttcctgcctgatcgcctaaaacattttgtgtttctactataacgttgtcaatagcggacagggttaatatgtcagagagtgtaacataatcaccgtattggtcaacagtggattcaactgttgtgacattgagctggttgcccttaggcgttactccttcggttaaaggtttgagcgctttaggcagcgggctgaatctgcggaattcaatagtctttcctgaaccctttgggataggcttgttctgtccgaactgtccatgaaccagttttgggctggcaaacctaatcatctgtctgtcgtaatacgctttcaattcaggagtaacgttatttccaagattattggttgatgtagtttgtgtattataatttatactcatttattatcctccttgtgtttacttattttataaactcttaaaatgaaattttttcaccgtttctgactctcttaactatttcgtcaagctcatcgtcagttaattcctcagggttctttttaaccatagctccgcttcctgccttgcctgtaccgttctcggtgattcgcctttcggcggacggcttttctccgcggctgcggtactgggaatcaccgtagttctgttcttccctatgacagagatagtaggcgtcttcaatgcttagtccatttccccaaacataattgcagaatttagggttttgcatttcacgtctcatatcaaaattaggatttttttctgaaaattccttgacctgagcgtcaatttctgaagttcttttattgatataatcctgcaaatcctgctggtcttcaccgtatccggcgaactgccccatttgctgggcgttttgataaccgcctggatattccgccgtttgaggctgacccatttgggtgttttggtatccgccttgataacctgctgtttgtgactgcgctggaggatagccgtttccttgttccctatatccgccggccgccggcctttgtcttttgtttccgaatccgagcatatttttgctcctttcatattttattttgtggagattaagtgtcttccacaattaaaattataataaaaatatagtgcaaacgcgtgccattaaattagtgtgcattattactaaaaaaaatgtattttttcttctagaaaaggctatattattagtaaaaatgaatgaaaatgattataaatgcttgtttgtgaaatatttatgaccgaaaacgcttgacaatgattgaaaatggtgataatattacggtgtaagataaataaatgaaaaatgaagcttaaaaatcaaatcttaaaaatgaaaaagaggggttgacaggtcatgcttactcaggagcgtcataataaaatattggaactgctcacaaagcaggatacggtcacagtcggcgagttatcacaagggttagaaacttcagaatcaactatccgaagggatttggtaactttagacaaaatgggcaaggtaaaaaaggtgcatggaggagcggcggctattcatagggtgagcactgtttttgaagaggacgtcactacaaaatcagcactgaatgttactgagaaggaagcgataggcagagttgcagccgggcttgttactaatgatgattttgtttttatagacgccggaacgacgacggcggcaatgattgattttatttacgacaatgtcagagccacttttgttactaatggtatagttcatgcaaaaaagcttattcaaaaagggcttaaagcctatattataggcggacagataaaacttacaaccgaagcggttgttggaacagaagctataaataatttgagaaaatataattttacaaaaacatttatcggcacaaacggtatcagtgttaaaggcggatacagcactcctgatgttgaggaagctgccgtaaagtcagaggtattaaaaagagggagaaacaattttattttaggtgaccataccaaatttgacaaagaatatgcggtaacatttggtatacttaaagacgcttgtatagttactgatgagcttgaggataatgaatttagggaacacgcggttgttaaggaggcttttgcatgatttatacagtgacatttaatccggctgtagattatgttatacatctggaagatatagaacttggcgctgttaacagaaccgagagtgaagagatattttttggaggaaaaggcataaatgtttctactgtgttaagtaatttaggcgctgaaaatattgcgcttgggtttatttcgggcttcactgggaaagctattgagagcggtcttaataaaaacggtataaaaaccgattttatagagcttgaaaatggtatcacaaggataaatgttaagataaaatcaaaagaagagactgatataaatggtcagggcccggttataagccatgaggcgatatcagggcttctagataaactaaaagttttgcagagaggcgattttctgattcttgcaggaagtattcctgcaacaatgccagatgatatatatgaaaaaataatggagcgtttaaaagacagcggttccaatattgtagtggacgcaaccggagatttattaaaaaatgttctaaagtatcacccgtttttagttaagccaaataaccatgagctgggagaattgtttggaattgaaattaatactgaggaagaaattattgaatatgcgggaaaactcagacagatgggggcaaggaacgttttggtgtcaagagctggagacggtgctgtattgtctgctgaaaacggtgaggttataaaaatgggagtgccgagcggtaaggttttaaattcagtgggcgccggagattctatggtggcaggatttatttttggatacttgcagagcggagattacagagaggcgctgaaactgggaactgcctgcggaagtgcgacggctttctccgcaggtttagctgaaaaagagaaagttgaagaacttatgaaaatcttgtaacttataaattataaatttttatataataaagaaaaggagaggtaaatatgaaggttattgatttgctgaagccgaacgcaatcgcgctaaacttcaatacggattccaaagaagctttgtatgataaactaattgacttgcaaagcaaagccggaaacatttcagacaaggcccagtataaaaaagatttgtttttgagagatgaagagggacctactgcaattggcgacggagtggctattcctcacgcaaaaagtgccgctgtaaagaatccaggattagcggctgtgacagtgcctaaggggattgaccttgacgctatggatggtggaaaatctaatttgatttttatgatagccgcaccgaaatcaggcggagatgttcatcttgaagttttatccagactgacggttatgctgatggacgaaaaatttagacaaaaattgctcagcgcaacgtccgcaaaggaatttttaaagtatattgacgaaaaagaaattgagaagtatggaaatgaacagcgtaaggaaaaaacgcaggcttcaagcagcacaagcaaaggtattaaaatagttgccgtcacagcttgtcctacaggtattgctcatacatttatggccgctgaggctcttgaacaaaaggccaaagaaatgggagtagaaataaaagttgagactaacggcagcggaggcacaaaaaatgctttgacaagccgtgatattgctgatgccgacggagtaattatagcggctgacaagaatgttgaaatggcaagatttgacggaaaacatatcgttcagactacagtttctaatggtatccataagccggaagctctaatagagaaaatagttaacggtactgccggtgtatactcacatacaggaggagctgagactacctcagaaggcggcgacggagtagggcactcagtatacaaacaccttatgaatggtgtttcacatatgcttcctttcgttgtaggcggtggtattttgatagcgctggcattcctgcttgacgactattctatagatccgtcaaactttggtatgaatacacctgtagccgctttctttaagacggtcggaggagtagcgtttaactttatgcttccaatacttgcaggatttatcgctatgagtatatctgacagacccggtcttgcagtaggttttgtaggcggagctctggcagtggcaggaactacgtttgcttcacttatgaatcctgacgtaaatgtagtatcagccggatttttaggcgcattgttcgccggttttgtgggcggctatttaactctcggacttgagaagctttgctctaaacttccggagtcacttgagggtataaagcctgtgctgatatatccgttaataggtattttggtaatgggactgataatgttcctcttcaacccgataataggtggattaaacacattgctgaatagtggtttgaaagcgatgaacggcgccagcaagatagttttgggattagtgttaggcggaatgatgtctattgatatgggcggtccatttaacaaggcggcttatgttttcggaaccgcttcaatagctgaaggcaactatgacataatggcagctgtaatggttggaggtatggttcctcctttggtaatagctctttgcacaactttctttaagaataggttcacgcccagtgagagaaagtcgggagctgttaactatattatgggtctctgctttataagtgaaggcgctataccatacgccgctgctgacccgcttcgtgtaattccctcatgtatagtaggaagcgcagtttcaggtgctttgtcaatggcgtttggttgtactcttatggctcctcacggaggaatatttgttttcccggttgtaggaaacgtattgggatatatagcagcgcttgttataggttcggttgtgggagcgctcctgctcgcatttttaaaaaagcctttgggcgaaaaagccggattagttaaaaaaggtgataaagttacggtaaaataatttaaattattattgacattgctaaaatatagtgataatattatagtatatttagtgaaaataattaaaggagtgtatattatggtttcaaaaacggttactgttacggatcctgaaggtcttcacatgagaccggcaggagtgtttaccaaagagatgtcaaagtttgattctgatgtgacaataaattttgacggaaagagttttaatggaaaaagcataatgaatgttattgccgcttgtataaaatgcggcagcgaaattgaaatagaatgcagcggaagcgacgagactgaagcgctcgaaaaggcggttgagctggtgcagtccgcagggtaggtgatgaaatgttcaagggaatagcaggctccgaggggattggtataggaaaagtcgcaatgataaaggagcaagacttgacctatgagccaaaatcaaaattgtcggttcaggatgaaacagctcgttttgagcaggcggttcaggaatttactcagagaactgagaaaatggcagaagaaatgcggaataatgtgggtgataaagagtctgaaatcctgatgggacatgtgctgatgatcagcgatcctgcgatgacagatgaggtcaaggaaggtataagcggcgggcttacttccgaagcggctacagaacaagtttttgagggttttgcctcaatgtttgaggctacgggagacgaattgactgtccagcgtgcagcagaccttcgtgatataaagactaggctgattaaaactctgctgggggtggaagaggtgaatataagcgcccttcctgccggcagtgtgatagttgccagagacttgaccccatccatgacggccgggataataagggagaatatctcaggtataatcacagaagtgggaggaagaacttcacactccgcaattttggcaagggctcttgagattcctgcagttttaagtatagataacataacaaaagaactcattgacggtgaagtggtaatagtagacggaacggacggcagcgtgattgcttcgccgggttctgaagaagtagaaaagtaccgggagcttaaaaagcgttttgatgatgagaagaaagagcttttgaaactggcgggcaagcccacagtaacagccgacggcaggagagtagagcttttgtgcaatattggcaaaccggatgactgcgctttagttattgagcgtgacggtgaaggtgtgggactgtttagaactgagttcctatatatggacagtaaagaacaacccggtgaggagcagcagtttgaagcttataaaaaggccgcaatgactctgaagggaaagcctgtaacaatcagaactttggatgtcggaggcgataaggatattccatatttgggcttggaaaaagaagataatccttttatgggatttcgtgcagtaagatattgtattaagaatcaagacctgtataagactcagctgagagctctgatgcgtgcaagcgccttcggtgatataagaataatgattccgcttgtcacttgtgttgaagaagtcagagctgttaagaagcttgtagctgagatagcgtctgaactggatcagaacggagtggcatacaataaggacataaaagtcggagttatgatggaaactcctgctgccgctgtaatagctgaccttttggcaaaggaagccgattttttcagcataggtaccaatgacctcactggatatacaatggctgcagacagaggaaacgctaatgttgcttacctatattctgcatataatccggcagtgcttaggaacataaaaagtattatatactgtggaagggcagaaggtattgaggtaggaatgtgcggcgaagccgcttctgatccactattgataccgcttttggttgcttttggactggaagaatatagtgtgaatccggtttctgttttgtcaacaagaaatgaaatatcaaaatggtcagtaaaagacgctcaaaaagttgcagaagaagctatggcatgttctacagaagaagaagttagaaatatcctgacaaaatatagaagataataagatatatacttatttcttatattatatatacaattaataaattgtatttatttttaaaagccgcagaaatgcggctttttttctcatattggctataaaatattaaaaccgcgcataaactgcattattgtaatgtagtttaaagtaaatagcaataaactatatattttataggtgaaattttagttgatttatataaataatgtgatataattaaataaagttataatggggtatgtttatacaattaaatttttctgagtgctatgccatgaactcaaaaaatttttttgtttttaaaataaagtataaagttattcaataatcgacatttctttttttacaatagatattttgattagaaatataattgtagattgattgcgtatttaatagaatgattttcaaaacgtcaggagtgagcagctaatgagagatatgaaagagcagctgagctattgtaaaaaaagacattcatttaagtttggcggtattcacagagtgtgtaaatctgttggtgcatgggcagtaattttatttatctttctttcatattgtccggctgtggttgctgaagacgtggatgagacagttttgactgttgcgtttcctgtcagtccgggaataaatgaggtttatgaagatggaacttatggcggatgcgtttatgattggcttagagaaatttctaagtataccggctggaaatatgatataaaaaccgcagatgaatcaaatgatgaagcgaccactgaattactggacggaatgattgaaggaaaatatgacatcatgggcggaatgttttatcaggaggaatatgagcagtattttaactatccgaaatatattatgggttcaaattattcactcttgatgtaccaaaaggataacagtgatattaaaggttatgattacaacactcttaacggtaaacgcataggagtttttggcaaagccgccagtaaaatagaacggttaaaaaagtttattgaatataataatttaacttgtgagcttgtgtattatgatgatagggaattatacgaaaaatgtatcgattcgggagatgtcgacctgatttacggcagtgacgtatatatgaaagacgggtataatgttgccgttaaacttgacagcgacccgtattatttggttacgtcaaaagataagcctaaattatgtgaacagttatcaaaggcgatggaagaaatttatgctgcgaatccaaattttgcagaggaactctataataaatactttcctgataaatatataaattccataacttttactgatgaagaagataaatttataaaggaatgcggaactttaaaagttgctgttataagagaccgttatcctctgttttatgagagcgatgggaaaaaaagcggaatcgtaccggaatgtttgaaactaatttctaatcggacgaatcttgattttgaatatgtgtatgctgatacatatagtgaacttgttgaaatggtagcatccgggaaagcggatataatcggagcctttatgaatgacgatacatctgcggatgatttggggcttataagaactgccggatatgctgatttagactcaattattttgagaaataaacaaagttttgacaaacaagacggtcttacgatggctgtacccgaaactctatccttaaagactacgggaaaaaacgattctattatcaggtatcctaagtatgaagactgtatggaagctgtaaacaatggcttggcggattatacaagaatgcctgcttcttttatagaaggtttttatacaaaggattattatgctaatatgactattgtagcggatacaaatattcaggaaacactgactctagcaatgaaggctcctgcaaatgttcaaatgtattctgtcctgagtaaggctgttaatagttttagcgatgaggatacagcccatattgtgtcacagccaaatttaagtttacctgacggtgtagttacacttaaaactgtcctttatactaatcctgttctcgtgattggtatatgtgtcggttttgtgtttattttgtccctaatggctgttttgtttatattttacagtatgcgtacaaaaatgatggctgtaaagcttgaaaaagcggaggagaccagccgggcaaaatcagactttttatccagaatgtcgcatgagatacgaacgcctatgaatgcgataatagggctgacgaatttggcaatattaagcagagacgctacccctgcattaaaagaggatttaaataaaattgattcatccgctaaattccttttgtctattcttaatgatgttttggatatgtctaaaattgaaagtaaaaaaatgacggttgaaaaattgccttttgatatgtatgaattaattgagcagataaaaattatgttcgtcccacagataagcgagaagaaattaaattttgacgtaacttgtgaacttgaagatacatgttatttaggggataaaatgcgtattaatcaggtgcttgcaaatttgatgtctaatgcttgtaagtttaccgacagaggaggcagtgtttggctgtcagttacagagtcaaaaattaacgagaatgaatcaaagcttagatttagtgtaaaagacacaggtgtgggtataaatgagaaagatattgatagggttttcaattcttttgaacaggcggaaggaagtaatttaagagctcccggaacaggactaggtctttctataagcagcagtcttgtaagtttaatgggaggagatttaaaagtaaaaagtgagcccggcaagggttcggaattttattttatcatagaactgccaatatatagtggcaaattgagtgaaccaaataacgtagctgataaaacaaaaaatattgttttagatgaaaatattttgaaaaatatgcgtgttctgttagcagaagataatgatataaatgccgaaattgccacagagctgttaaaaatgaagcaaatatccgtggatagagctccaaatggacaggaggctgtcaatatgtttgcaaaaagttcggacggcgaatacagtgctattttgatggatataaatatgcctgaaaaagatggattgactgctgcagctgaaatccgcaaaatgaatagaaaagactcggctgaagttcctattttggcaatgaccgcaaatacatttaaagaggacagagagaaagcggcagaagctggaatgacagggtttttgccaaaaccatttgacgctgaacagctctataaagcattaacagattcaattttaaaaaagtaaaaattaagcccgctgcctaaaggctgcgggcttttttcgtggagccgataagcggaatcgaaccgctgacctattcattacgagtgaatcgctctaccgactgagctatatcggcaacaacgataaatattatatattaatttgtttaaaatgtcaagtgcaatttttgatgtcaaaatcagcttattttagaaatttataaagttattcgtccagcttgtctttaacatagttggacacaagttcttccaagatttcatcgcgttccagtttgcggaccaaacttcttgcgccgttgtatgacgttatataagacgggtcacctgacaaaatatatcccacgatttgatttataggattatatcctttttcagacagcgcttggtatacagacagtattatttttttagggtcagcacgttctgtttcaacattaaatttaaccgtttcctgattttccatagttttcacctgcctttatattaaatatattatattgattatctaagttcagcgcctaagcaatttttaagtttttcaagtatattatttaggacgtcatttatttcgttatcagtaagtgttctgtcaggagctctaaaggttagagaatacgcaacgctctttttattttctcctacctgctgtccttcatatacatcaaagagtttataactttctaaaattccgtgttttgtgtcatttaatattttctctattttgccaacgcttattgacttatctataaccagcgcaatgtcacggtttgaagccgggaattttggaagagacttatattctctttcgaatgttgaaaattccattatggtgttaaaatccagctctccgcaatatatatcggtgtcaagcttaaagttctcggctatgtcagggtgaagctgaccgattgttccgataatttttccgcccgcgcatattttagcacatcttcccggatggtatgccggcgactctgtgtcggcttcaaactcagcgtttttgataccaaggtcatcaagaagattttgcactattcctttaagatcaaagaaatctacatcgccgtacatacccagcgccacaacaattttctcatcgggaagtttttgattttcaaccggaatataggtcatacccagctcaaatatttttgctttcggaacccggcggttataattaatctttaaagttttgattaccgacgagagcatattggttctcatgatactgttttcttcgccaagaggattgattattttgacaacattatcggccggtacctttgtcatttcaaattccttggggtcaataaaagagtaagtcatggtctcatacataccatatgcagtcagaagctctcttatgcagtcttcggttttttgtttaagtgtttttccgccaattgttactctgcccttcatcatggtagtaggaagattgttatatccatatattctggcaacttcttcggctatatccgccattgtttcgatatctccgcggaatgtcggaacttcaacatttgaaccgttaacctcaaattccagtctctttaaatattcagccatatcagaggccggtatatcagtccccaaaaatttgttcattttttcaggttcaaaaggcagaactgttttagtctttttgattggatatatatctatacagcctcctataacttccccggcgcccatttcttcaatcagttcgcaggcacggtttatagcgtttaaacagttttcagaatcaagtcccttttcaaacagagctgaagcgtcagttctcattcccaaggattttgctccacgccttacaagtataggattaaagttcgcgctttcaaacagaacggttgtggtagtatcggtaacttcagtgttggctccgcccatgactccggccacgcctattgcccttttttcatcagctattgttatcatacctgatttcagttctctcggctgttcgtcaagagtttcaagcgtctcaccgtctgacgcgtctctgactattatttttttaccttcaatattatctaagtcataagcatgcatcggctgaccatattcaagcatgatatagtttgttatatctacaatgttattgatagacctaagaccacaagcagtcagtctgcgctgaatccactggggcgatgggccgatttttacattcttaacagctcttgccgtatagcgcggacagatggaggggtcggcaatttcaacctttgcataatcattaacgtcttcattgtttcccgttggttttatttcaggtattttgaactctctgttaaaggttgcggcgctttcgcgggcaagaccgatgatgctcatacagtcaggtctgttggaggtaatctcaaattcagcaacgctttcgttaagccccaaagtttcggttatgtcctcgcctataggtgtatcatccggtaaaatcagtattccggcagcacgttcctttgaaatgcccaattcatcagttgaacacatcataccataactcataacgcctcttagcttaccctttgtgattttaataccgccgggaagtgtgcttttatgttttgcaacaggaacaacagcgccttcaaatacgttggaagctccggtaactatctgtatatcctcgtcttctccgacgtttacttggcaaacaaccagcttgtctgcgtccggatgtttttcaattttgtctattttcccaacaacaacgttcttaaactctgcaccggggttttcaatgccctcaactatagaaccgctcatggttagtttgtctgcatactctttctcgctgatgccgtctgtattcatataatcctttaaccaggataatggtaaattcatacttgtttcctcctaaatattagaacattggttctcagtaaacttctgaacctgcttcgggtttttaaatataagtatttgtttccccggatatttcctgccggcttcatcaagacggcggaggtatttttttctgtttttccttcctttgtgaagtacccagcttacaaattcaaaatcaattttttcatcgcagcctttacccatatcttcacgggttctgcctttgtagttaaaatagcgtttgagtattcgtttaaaacataaaaatcggttaaagtccaaaaatataatagtatccgccagctctaatcttttatcatatagaacctttgaataatttccatcgattacccatttatcttgattcagcacattttgaagagtctcagactcaatttcaggagtattttccacccagcccggaagccagtggagcgaatcaagatgcgtaggggtcgtccctattttattagctataaaccgagccaaagtagattttcctgcgcctgaaaatccaattatcattacgcgtttcataattaaaattgctttaagaacccgagatcgttttcatagaacaatcttaaatcgtctataccatatctgaacatagcaacacgctcaagacctattccaaaagcgaaacctgagtatttctcagggtctatattgcagttagccaaaactttgggatgaaccataccgcatccaagtatctctatccagccttcgcctttacatattctgcagccttcgcctttacagctgaaacaagatatatcaacctctgcactaggttcggtgaacgggaaatgatgagggcggaatctaacttttgtgtcctctccataaagtctctttataaacacttcaagagtaccttttaaatctgccatagttatgccttcgtccacaaccagcccttcaacttgatgaaaaactggtgagtgtgtggcgtcaaccgcatcgcttctatatactctgcccggtgaaactatacgtatggggggctgctgtttttccataactctaacctgaactgaagaggtctgtgttctaagcaaagtatcttcattgatgtaaaatgtatcctgggtatctcttgcagggtggtcaggcggaagatttaaagcctcaaaattatagtaatccagttcaacttcaggaccttcggctatagtgaaacccattcctataaatatatcctttaagtcatttaaaacagtagtaatagggtgcttttttccgtgttcgggtctgttgccaggcagacagacgtcaatggtttcagaagcgagttttttgtcttttgccagctttatgagagctttactcttttcctcaagtattccttcgataaagcctctgacctcattggctaactgtcctataacagggcgttcctccggcgtaagtttgcccatacccttcatcagagatgtgagctcgccttttttgccaagatatttgactctgagattctcaagctcagtcaaatccagtgctttttcgagcgctgactcggcgctggttttgatagcgctaagctgttctttcatatatataatacctcccatataattatacaacgttatttcaaataattttaacacacaattcctaatatttcaaggcttttaaggtattttttaagtatgcaagtttattttactgtgattttagcttgtgttttatacggttttggtgtattattattccaatagataccttagggggaatcataaatgaagaatattttaaaatttgccggtgctgtgattgtagttctgatgtcgtgtataacattagtatttgcggcaggacaagcccagccggaagtaacggtgaaaaatcaaaacggattgacattaagaaatgatgttttttcgtactcagataagtttataacaagtgaaattaagaatactgacagtgcggattcttctgaggtgctattaatggcagcgtatgatgaggaagataatatcataagtatcagcagtaccggtgatttaaatattgctccgggggaaacggcagaatgcgttcttagtttggacagtgcagatagaactgtaaaatcagtacgagtctttgtttggagagattttgagagtgcagaacctatttcggagacgatagtattcactaacgaactttatacttacagagatgatgcaaattcagtttttgtatctgttgaaggaagtgattccgacggagacggaacgtttgcaaagccattcagaacggttgatttcagtgtatcgaagctgtcatcgggtaaaactctttatattatggaaggaacctataaagaaaatatatatgtgggcgtaaaaggcacagaggcagagccgataacaataaaggcggctcccggcgcgcatgcggtgatagatggaggcggaaagctgaacgagaatataattgaacttgaggcttcgtcaagcgatattataatatcagatttagagcttcaaaacggctggggcggaatatacagcgaaaattcaacctctaaatcaggaaagaattttgcggtatgcaataataaaatacatgatatagacggcaataatgacgatacctttgcagtggttttttatgctaaaaatgtaaatccggtaacaaatgtgattattgacgggaatgaaatatataactgcaaaacttatacgagtgaaacggttactctaaacggaaacgtggatggtttcagagtgtctaataatataattcatgattgcaataatataggtctcgacgcgataggctatgagggaacatgcaaaacaaaagaactggactgtgccagaaacggcgtgtttagagataatactgtttataatgtttcaacctatggcaatgagggttataaagatggttcaggttacgacttgtgctgtgcgggaatatatattgacggaggtcatgatattgaaatattagataataatatttataattgtgatataggagttgaagtagccagtgagtctacacgggcgccgtataatatatcatataatgtgtctgtaaataataatataatttctgagtgcaagggtttggcaggaatttgtttcggaggttatgataataaggttggctggacaaaacagtgcgattttgttaataataccttatataataatattgtcgggataatggtgcagcaggcagaagataatataatatcacagaatataatttacggcggagagaatggacttgtattttcttttgcagacgaggacggaaaacttgtttataaaggtgttggtccgtataatgacactaacaattttggagcaaactattggtatgacccgaatagtgtttcagggtataactgttggtttgatatgcttccggcggaacagctttctaaacagataaccggtgtagaccctaaatttaagtctcctaagcagaacaatttttctactgaactgaatgcgctgggttatggagctataaaataattttaaataataaaactatataataatgtcagaaagatggagagatgatgaataatattttaatgtatgtatggcttttggtggggtttttcttattaataaaaggagcagatttgtttgttgacggcacttcatcaatagcgaagcttctaaaagtaccaagtataataataggactgactattgttgctatgggaaccagcgcgccggagatggcggtaagcgtgggtgcagctataaagggtcaaaatgatatagtaataagcaatgtgctgggttcaaatatattcaatcttttggtagtggcagggggctgtgcggtcataaagagtcttccggtgtcaattgatttgcggaaaagagatttcccgttttctattggtatagctgctcttttgcttttcttttgtttaaatagtttgataattgggggaaaaggttttactatcaacagaacagagggcataattctttttgccggacttatggcgtatcttggatttttagtatactcagctgtaaagggcaggacaggccttcccggagacgaagaaataaagacaatgtcgcctcttaaaagcgttttttatacagctttaggtattgcaggaatagtggtgggcggagacttggtagtggattccgcaagtgatatagccgccgcttttggtttgagccagacaataataggactgactattttggctgtggggacatctcttcctgagcttgtgacttctttggtggcgacgcggaagggagaaaatgatttggcaatgggtaatgttatcggttctaatatttttaatatattaggtgtgctgggattatccgctgctgtcagtcctgttaaagtttcgggattctccgttatagatttaagtttgttcattggattctgcctgataatttacctggttacgttttttaggaacaagatagagagactgccaggtattttaatggtgttgacatatcttggatatatgacatatgccgttatgcgtgaagtattttaagtaaaataaatataaggagagatttcatgaagagaaaaacattttatatcattgcaggagtttggtttgctatgatagtcttgatattgctggcttgttatactccgattgttgacccagtaactcaggaagaagtaaaaaagtacatggttttggcgatttgtgtaggagctttggcgcttatgcttattagaagaaaggtaaaagacgacaatgacaggagttaatggccttttttagagattaatatctccgaagttacagcgatataaaaaattttatatatttttcttattagggaactgtttatgacaaattttgccttgtaacttgtttataatactttcgtaatgaaatgttaatgtggttacggaggtatttattatgagaaacacagaattggtgtctgttgagacttctctgcaggtacaacaaaaaaagcggaaaggaatcgatttaaaattttgggatattccggtgcggcttttgggcttattgtttgcgggggcaatgcctataagcggaatggcgccgtttggtttgtcttttttgacgcttgaccgaaagttttcactaaaaagcgtcattaatttgatttttgtgtctgttggctatcttcttctttttgattttgagcttgctttaagatacatatctgcttgtgttatttttgagacggttttattcgttatagaaagaaacgaaaaaccgtctttgtatttcgttgctattgtttcagcggcagccttgtttctttgtgagtttggcgttttaatgtggacaggctttactgttgcgggtctaatacttataatttgcgatacaatgcttatggcagtcggagtgatggtgtttgacagaagtagggatgttctgcttgaaaataagtttttgtcgcgttcactgctgacagatgaaaagataagcttatgtataatggcaggtgtgattttgctcagtacaaagtcaatcactgttttggatacgtttaatatatctaactttttggcatgcgttttaatcggggtagtgtctttgtcaagacatggtctgactcatggcgccgttgcgggaatatgttccgggattatattaggaatcggcggtttatttccggagtttgtggcagtactcacaatctgcggcctgctgtgcggtgtttcagcccagttcggaagaaaggttgtttgcctttgtcttggtgtatgcggtttagggataatgctgtatatgggtatacccggcggacaaacgcatataccaaatatatatgagttggttttggcggcggctgttgtgtactttcttcccagaaaggctgttataataggtgagaaagtaactgattttaatgttgacaattcagacgatactgagcgttttagaatgtatgttactgaaaaacttatgtgtatatctgattcgttctatgatatttcaaagacatttgattcaatgtcggacaagcagacaggcatggatatgagtgatatctcgttgctgtttgacactgcggcggatagagtgtgtaaaaactgtgagagagcaaatttttgctggaaaaaggattttaatgctacatatgcagctatgtttaaatttttggagataatggagcggaaaggcagtctgcagctcagtgatgttccaaaatgtttttcggataagtgtgtacatttgcttccgctgataacggaaataaacaggctgtttgagatttataaaataaacagaacttggaaaaataagcttcaggagaacagagagcttacgagcgagcagtttaaggggatttctgaaataataaagaatgccgcgtcggaaatatgcggcgaaaagagttttgatatcaggtcggcggatgaaataaaagaagttttaaacgatatgggaatttcagcccagcgagttaacgttgtttgtgacaagaatggaaaatatatggtagaaatcagcgtgcttgactgtgatgacttctcagtttgccaaaagagaataaaacccgtaattaaaaaggtccttggaatcaatgtggctgtgccgtataatgagggtgatacctcagacagcggaaagtgctgtatacgtttttgccaggtagaaggttttgatcccagtattggggtggcaagcctttcaagtaacgaagaaagcggagacaagcactatacgaactacctgagcggcgggaaactggcggtaactataagcgacggtatgggaacaggacacaaggcggctatccaaagcgacgctattgttaaacttttgggaagctttttggaagccggttttgataagacaatagcagtcaagctggttaattcagtaatggtgatgaagtcagccagggatgcttttgcaactgtggatatgtgcgttatagatttgtatactggtgagatagaatttatcaaaaacggcgctgaagccagttatattaaacatacagaatatacagagactgtgcgcgcggcgtcattgccaataggaatagtatcaatcggcgatatcgagacgtttgccaggactttggaaaacgggtctatggtagttatgactagtgacggtgtaatatcagcggcggaagacaattggattagggaactggttgaggtaatagacatggagataccgccaaaagaattggcgcagataatactagacgaggctgttaagagaaatgctgaaaatggtattgaaaatgatgacatgacagtaatatgtgtgaaattgtctgacagaagagttagagcagagcagaagcatgtgccgaaagcggcagtaatgtaatgatatagtttataaaagccgattcagttcaaatctgaatcggcttttaaaattcgtttattaataattgaaaaaataatacattcatatattaataaaaaaaacataatttgattaacaatcaaaaaccatatgaggtgtgcttagctaataactgtaccgtataagatgatttacacttaaacacgaagtgtttaaaataaaagagactataaaaacataacaaataaaatcaaaagagcatccgttaaggagatcatcggaagggtgcattcatgcaccgcgtgaggcaagcaatcatctgaacacgaagtgttcaaaataaaataaaccaaaataaaacataacaaataaaatcaaaagagtatcaggtaaagagagcatcggtagggtgcatttatgcaccgcgtgaggcgagcaatcatctgaacacgaagtgttcaaataaaataaagcaaaataaaacataacaaataatattaaaagagtatcaggtaaagagagcatcggtagggtgcatctatgcaccacgtgaggcgagcaatcatctgaacacgaagtgttcaatatataactcaatacttattcttaataatcagattaataaatagaatattatgaaaatatatctttatacaatcggtaagattaattgacaatgtttttatcttatgttatcataacttcaaaatatatgactagaataaatatttttccgtgttatattggtaaactatatattaatttcagcgcagttttttaggaggctattttatgcttttttcttttgatgatataatggaatatgtggaggaaaacgacgtcaaatttatcagacttgtattttttgatattttcggcagtatgaaaaatatatcaattatctcgacagaacttccaaaagctttggagtatggcgtcacttttgatgcttccgaaataaatgggtttatgaatattggcgaaagcgatcttttgcttaaacctgacccttcaaccgcagaaattttgccgtggcgtccacagcaggatagggttcttagaatattttgcgatatttgttatcctgacggcagaacgtttgagggcgattccagaaatattttaaagcgttcggtagactgtttgaaagagctcggatactcgtgcgatatcggttcggagtgtaaattctatctttttgagttggatgaatacggaaatccaacaaacaagccgcatgacaacggcacatattatgatgtggctccggtagacaagggagaaaatattcggagagaaatttgtcttacgctggaggaaatgggtattcaacccgaaagttcgtatcatcaggcaggccccgggcaacacgagatagtttttaaatatggcgcaccggtagaagcagcggatcatctaatgacatttaaaaatttggttaagacaattgcgcatatgaacggacttttcgcttcttttatgccaaagcctttgcaaagacagaatggaaatggtatttttgtaaatctttcgctttatgatatggacggaaacagcgttatagattataataatgagactggcagtcaatttatggcaggtatacttaaccatattaaggagattactctatttttgaatcctttaacgaattcatacagcagatttggagagtttgaagctcctaaatttataacatggtcacctcagaatagacagcagctaatgcgtataccaaagaatttggcaggagactgcagacttgaactccgctcgccggacggcggagcgaatccttatctcgtttttgcattgatgatttatgccgggattgacggaataaaaaacaagatgattttgggagaacctgtaaacgtgacctataaagaagacatagaaggtcttgaatgtttgcctcaaaacttagagacggcagtgaattatgcgaaggatagtgattttctgaaaaatgttttacctgaaaatatcctgtctacttatattgaaaataagaaaattgaatatgacaagtatgtcaaggcgagagttaaggagcaatatgaacgcgatttgtatttcggctctatataataaaatttaccattaattatttgggaggttatgccgttgtacaatagaattcttatagtttcggcatctcaaaagagcggagacgcgctggctcttatattgagacggtttgctatgaataacatagattttgcgtcaagcggagttgaagccagacgtgtagtcctgcgttcatcatatcagcttgttatcataaatgctcctcttaaagatgaacagggaagctctctcgcttctgattttattcacagcacacattcatcagtaatattaatagctaaatccgacgttgcggatatgcttgcttcaagagtggagggagatgggatatttgtaattccaaaacctttgcagcagagaacttttatgggtgcggtaagattagcactgggattttcaaacagatttattgagatggagaaagagatttcaaaatatgaaaagaagtatgaagaattgcgaatggtttccagggcaaaatgtgttttgatagaaaaagagggatgcagtgaaaaagacgctcatagatacatagaaaaacaggcaatggacagccgggaaagtaaggcaaggattgcagaaaatatcttaaagaaatatttgtaatttttatatataaaaaacagcttcattattatgaagctgtttttgttttgtattaactttatacctgaggcgaatcaatggttactgtttgagttgcctcatcccaaccaactgtatagccaaatgcttcagccaggaatctaagcggaatatacatacgtccgccaataccgtcatattgtttaacaaaagcagttgtatccattggcgttacaacagtctgacccatgtcagaaattctgaatatgttataagaaccttcctgaacgatatacatttcagaaccatcaagaattagagcagcattagtattctcatcatacttaaccgtcttattcatagactcagaaacaaatctgataggaacgaaagttctgtcgtcctgctcaataatttcacccatttcagccggtatttctgcaacgtttccgttaataactatactttgagccgccgcaaaagccgcttgtgaaaagcttgtcaacacacatataactgctaaaaatcccgctagttttttcatataaaactcctccataatatattgttcattaattatagcataatcgatgaaaaatttcaagggtgtttttatagttttcagataagtcatttttttacagagtgtataaaaatattatagatatatttgtaaatcaatttaagaataaacggtattttatatgttgaagtttaatgattttaaatgatgttacagagtgaaatataaagtgtaatggagtgaaatattttatatgttatattgtagtcgctcgaataaagtgtaaagaaatgtttaggttatatctaatataaaattatataaaaacgtatggggtataagcatcgtggagattgtgactactcctgtaagataggtattattcacaattactttttatattttaaccttggaaagactgcaacaaactagacagaaaggttaatggtgtttttagtgaacgttagtaggatatgctagaattcctaattgttattatatcacgtgaggcttgagtacacattttatatttactaaaatctttttataataaactttttcattgctgcgcgcctcacgcggcgtacttcgtacgcccttccgaagcttgctataccgcattattctgaaaacttttagaattaatctcttaaaaaagtgttttttggtgaacatcggcagggtgtgcaagcgcacacctcgttaggtgagctgtcatctcacgcgaagcgtgaacatatataaaaaagtttgtcataattctttttataataaacttttccgcggctgcgcaccttacgcggcgtactacgtaagcccttccgaagcttgctatactacattattcttgaaaactttttagaattaatatcttaaaaaagtgtttcttggtgaacatcggcagggtgtgcaagcgcacacctcgttaggtgagctgtcatctcatgcgaagcgtgaacatatataaaaaagtttgtcataatcctttttactaataaatttttccgtgactgcgcaccttacgcggcgtactacgtaagcccttccgaagcttgctataccacattattcttgaaaattttttagaattaatatcttaaaaaagtgtttcttggtgaacatcggcagggtgtgcaaacgcacacctcgttaggtgagctgtcatctcacgcgaagcgtgaacatatataaaaaagtttgttataaacctttttactaaataaattattccgcggctgcgcgccttacgcggcgtacttcgtacgcccttccgaagcttgctatactgcattattctgaaaattttttagaattaatatcttaaaaaagtgttttttggtgaacatcggcagggtgtacaagcgcacacctcgttagctgagctgtcatctcatgcgaagcgtgaacatatttaaaaaagtttgttataatcctttttactaataaacttttccgtggctgcgcacctacgcggcgtactacgtacgccattccgaagcttgctataccacaatttcagacgttattgacatataaaaacaatatctattaatatattattttgaacaagtatggtcggtcacacctgtttggttttcaagcaaactattattacaatctagaccatttgtatattacaaaattcaatagagttatctgatattgaattttaaattttataatgaattgttttatagaatataaaatgcccgctttatatgcgggcattttgaatagtgtcttaagccataattactatttgattttcagaattcataagatatataattaaatattggttaccattttcgtatacaacataggaatctttgccttgagcgtcaaactttgtctgtgagtatccggcgttttttaaagcgtcaagatacttgttataagcgtccatatccatttcatatttatagtaagtattgccgctgttatcggtctctgaagctgtcatagtttttccggtaacactttcaaatttgggtatagtagactttgcatagaattcatatgttccgtctccggtcggccactcgtaatctttgcttgaagcggaattgccgtttctgtcggttggaagaggatcgctcacctgtccgcctgaaccgccgttatttccgtttccataaccaccgccgttattcccgggagttccgttgtttccgtttgcataaccgccgttgctgcctgaaccattattatttccgtatcctttataaccgccgccggaatcaccgccgctaccattgttgtttccgtttccatagttataaccgccgccgtatttaccgaaataatcaccgtattgattaaaaaagtcaccatattcgtcatagccgccgctgtccgggatgtttccataattatgggcgccgtactgctgatgaatacggttatcttgtgcgccatatctttgggttttaaaagtgctgtagacagaaaatccaataaacaccaaaacaactgcaagagatatagcggcaatcggtatagttatttctcttccccacagttttttatgattatttggctgataagaaataggttgttcaatgtatccgttctgtgcctgtgtaactcccaaattgtaagccgcattagtaaacggactttctgtattttcgaaatggtcattattgctttgatatgtggtgctgtccttcgaataagagctttgttccttttcgtcagatcttgctattgtgccgcaggcgtcgcaatatttggcgtcatccggtaatttttttccgcaattactgcaaaacattatcctcactccgttctaatttatttaataatattcaagtttattaaaaatctttcttataaaataattatagcatcttttatctaggaatgattacataattgttaataaattattatattttttagaaataattatactattgacgcgccgctttggatatcatcaagcgttgaggttaaaaccaatttaccgtcgtgttcggctgacagtatcattccgtttgactctaaacccatcattttgcgcggaggaaaatttgcaatgaagagcagattcttcccaataaggtcttcaggtttataatattttgctattccggataatatttgtcttgtctcgcctccgcattccagttcaaatctgagtaatttggaggatttaggaactttttcgcaaactttaactttgccgacccttatatctagtttttcaaagtcatcgaaggttaccggttctttaaacggttcaatttcaggttgagtttcctgttctgcaccgaattcttcagtaagttcttcaagttttttatccaaatctattctggcaaatataggcgtggcttctgagaccttggttccgggtttagttgctccgaagtttgtaaggcttgcgtatgataactcgtcagcaccggtttgttttgctattgcagaggcagtatcaggcaggaagggctgtagaagagatgtgatatatcttatcgcttctataagattatacattacggtttttagagtttcttttccttcgtctgtttttgcaagtatccatggtgttgtttcatcaatgtatttgttagaacggtcaactattttccaaatttggtcaagactgtctgaaactctcagtgtatccatagttttgacgattttttcactgcattctatgcaagtatttgaaagtgaactgtcaaaatcagtactgttgccgggtgcgggtataataccttcgaaatatttattcaccattgatacagttctgttcacgagattgccgagtgtattggcaagatcagaattatatctgtttattaaaatttcataggttatagttccatcctgagcgtatggcatttcgtggagcagatagtatcttactgcgtcaacaccaaaatgttttactaaatcgtcagcataaattacgttgcctatagatttgctcatcttatcttcaccgtttaaaagccatgggtggccgaatacttgtttaggaagttcaagacctaaggccattaaaatgataggccagtatattgtgtggaaccttaatatatccttaccgattatatggacgtcggcaggccaatacttgctgaactcaggcgaactttcatcgccgcggtagcctatagcggtgatatagttggtaagtgcgtcaagccacacgtatacgacatgtttttcgtcaaatgaaaccggtattccccagtcaaaactggttctggaaacgcagagatcctgaagcccgggttttaaaaagttgtttaccatctcttttttgcgtgattcaggctgaatgaagtttgggttttcttctatatgcttcattaagcggtcctggtaattactcattttgaagaaataagcttcctcgtcttgtttatgaacttcgcgtccgcagtccgggcacttaccgtcaactaactgagtatctgtccagaatgattcgcatggagtgcagtaccagccttcgtatctgcttttatatatatcgccttggtcataaagttttttaaatattttctgaacggttttgacatgatagccgtcagtagttctaataaatttatcatagcttgcattcataagatcccaaatttttttaatttcaccggcaacacggtcaacatattcttttggggttattccctcagcttcagccagctcctgtattttttgtccgtgttcatcggttccggtacagaaacagacgtcatagcccatatatcttttaaagcgggcaatagcgtcggtcaacacaacttcatatgtgtttccgatatggggttttcttgaggtataagcgatagcggtagttatataatatttttctttatcacacattataaatctctccttaagtttattgataaatataggatagacggtctatcaatctatcggtcaccgaagggtataccgaaatgttcgtacgcggaaggagtgacaactcttcccctgggagtgcggttaataaaaccaatctgcatcaaataaggttcataaacatcctctatagtatcagtttcttcaccgattgttgcagctagtgtttcaactccaacaggtccgcctccgtactgattgataaccgtcaaaagcattcgtttatctattgcgtcaagcccatggtcatcaatttccatcttattcaatgcgtggtcagccagttctttggatataacgccgtcttggcttagctgggcgaaatcgcggactcttttcagcaatctgttggctattcgcggagttccgcgtgaccgccttgcaatttcagaggcgccctcatcgtctatatctatattcaaaatacttgcacttcttttaataatagttttcagttcatttggtttatacatctcaagacggctgataacgccgaacctgtctcttagcggagccgccaaagcaccggctttggttgttgcgccaataagagtgaacttaggaaggtcaagccgtatggagcgtgcggacggaccttttcctattattatatcgagagcgtaatcttccatagccggatataatatttcttccacacttctgctcattcggtgtatttcgtcaacaaataatatgtcgtcctgtgaaagattggtgagcagagccgctaagtcgcccggtttttctatagcgggaccggaggtaatgcgtatgttaacacccatttcatttgcgattatgcctgcaagagtggttttgccaagccccggcggcccgtacagaagaacatggtcaagaggttctccccgcatttttgcagcctcaataaagactttaaggttctcttttgcttttgtttgcccgatatattctgaaagaattttaggtctgagcgtgtattcaatttcagtgtcggcattggtttccccggtggaaactatgcgttcttcgttactgtcagttattgccatatgtttcactcgtttctttattcatcatgtcggtttatgtgtttgttatgttagtataaccgttcagtatactaaagtaggttttttaatccatattttatcatttcttcggcagaccctgttgctcctttcagtgctctgcgggcttcttcaggagaatacccaagaaccaccaaagccgatacggcctcgttatcgtcatccatttcgggagaaaatatttcttcagccggcatatcggatatgtctgcatctttaaatttatctttaagctcgagaatgagacgctttgcgccttttggtcctaaacctggcgtgtttttagctagatattgagcgtcatcggtcacaacagaaagagcaaattttgagggagatatattagataacaaattagcggcggttttagcgcctattccgcttactcccaaaaccatttcaaaaatatttttttcctcctgtgtggcaaatccatataatgataatatatcagatgttgtttttatattcaaataggtgtataacttcgcttttgacccgatttcacccaaagcttccagcgaggggcgggtggaatatattctatatcctatgcctccggtttctattactgcaaagctgtcagtttttaatgccagttttccttcaatataatgaaacataattatcctgcctaatctttaaaattatttgcataaatttaattataacaaatatttcagtctttagcaagcccaaattacacagttttatgtctgtaaagagaaagatacttgtttggattgttcttgataaaatgagggctaattttatgttttaaaaaaattacaaaacgggttttgatttgttaaaatggcaaatttacagataaaaccagcggtttttcggtattatatagagtggtttcacttgacaaatttgagtaaatgctgtaaaataacacatgcagtttttgtcttttgagtgtaaaaagacaatgctgccttaaaagttaaaataattaatttatataagcatagcaggagtaaacagattgtttttaagttagagggattgtatattcttgctttgactacaacaaggagggtttaaatgaaaaccttaaagagaacattagcaatggtgttagctttggcaatggttctgacagctatgggtatgactgtcgtttcagcggcgtcatacagtgatacgcaggggcattgggcagaaagctacataaacacatggtcagacaatggagttatacagggcgacggaggttatttcagacctgacgacgctatcacgcgtgctgaagtagctcaagtaactcaaaacgtgataagttatgttaataaggctgccaatacatttactgatgtatctgcatcagattggtatgctgacgctatattgaaactggcagctgccggagctctcacgggaaatggtgatggaactatgtctccaaacaactatatgacgcgtgaagaggcaatgacaatgcttgcccgtgcatatggactcacagttgagaattcacaggccggtattacccagtatgctgattatcagaatatttctgattatgcaacaggatatgttggagccatgacagctgaaagttatgtcggcggttatgaagacggaaccattcgtcctaaggattatatctccagagcggagtttgttaagattcttgacaatatgataaagctttatattaccgagcccggttcatacggaagccagtacgtcggcggtttggttatgattaagacaggcggagttaccttaagcggtattatcgctaagggaatggtagtatcacctcaggtaaacggagatgttactattatgggttctcaggtttcaggaaatattataaacttgtcttcaacagcgaacgttacatctaattcaggaaatgttgtaagccctaacgcttcaagcaatcctaatgtaattattaacggaaacaatggcggaagcaattcaggcggaggaacaagcgcaaacactgttactgtaaaattttattacggcgataattatggtacagttaaaacaaagagtgtaacaaaaggaaagaaattgtctcagagtgctattcctactcctaaagagagtaactgggatggtctttggtatacttcaaaagctgcagctgaaaagtgcagcggtacaacatttgacccatcggtttcagctgttaacaaaaattataatttgtatgcaggtcatataagcagttctgatttgacagacgttgaaattgcggtaggtaataaaactgattacgttaacgtatatgtaggcgatacattaacggcagcaaatcttgctccggcagctgctaaaaattatgtttcttatcagtggtacagagcttcagaaagccatggaacaggtgaaaaaatttccggcgcgacaaagagctcatatacagccactgaagctgataagggcaagtacttgaaggtagtagttacaggtgacggaaataaatataatggaaccatttatgatgtttcttcattagttttggcaaaggatgctccttcggtatatcctgaaagagttacagtatcttatggaaacgacgcgtcaaccacccttaccctcagcgaaggtatgaatgtaaccggagttgcagatgagagcggaaagatgctgaacgctgaacagtacacatataatcaagaaactggaaagctgacaatttcgaaagattattttgccggattaacagatggattaagtgcgttcacaattattgtatctgaagacgctgtatacaacccaatgtttatggtttctattaccggaggtcctacagcaggtccagtgccgacagaggaaccggaaccgactgctactgttaatccttcagaacctacagagggaccgacagaagagccggtagcaacagcaagtcctgaaccaacagaaggcccgacggaagagcctgtagtaacagcaagtcctgaaccaacagaaggcccgacagaagagccagtggtaacggcaagtcctgaaccaacagaaggtccgacagaagaacctgtggtaacggcaagtcctgaaccaacagaaggtccgacagaagaacctgtggtaacggcaagccctgaaccaacagaaggcccgacagaagaacctgtggtaacggcaagccctgaaccaacagaaggcccgacagatgaacctgtagcaacagctacagcaagtcctattccttcggaaggtcctacctctggtcctgtaaccagtgaggtttggaactttaatgacattgccggcggaacatcttataataccggtgatacaataagtaatgcaaacggcaaaaatatcatagtaaacgttgcagaagctgataccattatgccaactgtaaaagtaagagctgacggggataattaccttgagtttaatgatacaactacagcaggaacagcaaagcaggatggttggtcttatgctgcagaatcacctatggatggagatagatttacagctgaattagatttcaaaaaaggcgatactttaaaagatactatattaatgagattttttgatactaacaacgctgatgcaaacaacacatattccagcgacggacgtgtgtttgaacttaaaacagccgataaaggagctcttgccattgttgactatttttcagttggttctgacaacaaggctgtaagcgtcccaataagcggatttacttatagtccggataagtggtatggagtaaaagtagagtatacaaaagctgacaatatagtttctatctatacaaagaatgatggtgaggcagattatacgcttagaagctcaattgagcttggaaatacaggcggaactaaaaaagtggatacagtgcctcagcttgcaataaataaagttggcgcatatactcccggcggaggaagcgcagttttgggcgttgataatatcgcattcaaaacaaaaacatatattcctcaggatattaatgtaacaggcaaagcctacactatattctcaaatgatttgaaaaacagtcttgaaccatatgacaattccataaatgctgttttggctttcacaaagtccggtgagtctgaaccgtacgctacagctgttcctgacgcagatggtaactataacgtttcactgtttacaggagaaacctacgatgtatctgttattagcggcggagatggatatactttttctccgaagtcaacatcgtatagtcttccggttgtagttgatgagccaagcaaaaatgttttgtttatgaaaaacagagaagcggtgccatatgctgatactgtatatgttggatctgacaaagagtataaggatataaatcaggcaatggcttcaatccgtactatgacaggcagagttaatgaggatttaacttcaaatcctgtaactatagttcttgaccctggaacatattatggtcaggtaatagttgatgttcctaatatcacaattaagagtgctgatgaatcgaatccggcagtcgtatcaaattattatggtataggatatgtttattactcaatgggcagcaataattattatgatgctgattgtgcagctgcaaaggatacgaagaatactgcaacaagatggggcgctactattcgtattacagcggataatttcctggctgagaatattgattttgaaaatacatttaatcaatatgtaacggatgctgaaatagctgacggcgttgaaccgggcggaccggataaaaagaattttacaagaaagaaaggcacaaaagttactataaaagactctactgaaagagctgctgctgtagcaattgatgcagataacgtggagttctaccgctgcaagatggtgtcaagtcaggatactttgtataccggcggcacagcttatttaaaggaatgtgatattttgggtaatacagattacatttttggcggtaacagcgtagtgtttgaaaattgtaatttaacatggtatggttactcggataaggcaaatggcggttatatttcagcttgtaaaacaagttctgaaactgacccaggatacttcttcacaggctgtacagttaagaacagtaatataagcggtatgaaatttgctcccggcggtttcggaagaaactggggcggtgcaagatgcgcagttttctttaatgacgttactttagacggagtctcaaaaccgaacggctggacaaaaatgggcggagagctgagtacatcgaaactttatgttaactatgtacataatattaacagcactacagatttgactgctgatagggataatccaaatgataaagcaacagaaattccaagtcctgaagattatttttatggatggactcctgttcattatgttgcagcaaactaaacgtttaataagatttgaatttttatattatataaagtaacaaaaaaacggttggagcaatccaatcgtttttttatttgatgaactataattaaatacataaaatttttattaaaaataaaataatagacagaataattgcgttaattatttaacatcgtagacaaaaaactacagatattttataatgaattcaaatttttttgcatggtttaacctcgatggcaaaaataccgttattttaaacaaaatattacaattatataattgacaacgagtgcaaattatagtaaaatgtttaatatatatgaaagtgactaaagttttttacagatttattaccacatttattgaaaaataataataaaatataataaggaggggttttagatatgaaatcctttagaagaacactggctttggtattagctgttgcaatggttttgaccactttcggtatgactgttgtttcagcggcacagtacaatgatacagagggacattgggctgcaagctatattgatacctggtcagggtatggagttattcagggcgacggcggctatttcagaccggacgacgcaataacccgcgcagaggtagcgcaggtgactcaaaatgtaataggctatatagacaaggctaacaacaaatttacagatgtgtcagtttcagattggtttgctgatgcagtgctgagacttgttgcggccggtactctcaccggtaacggagacggcacaatgactccgagtaattatatgactcgtgaagaagcaatgacaatgcttgcccgtgcatatggtttgacggttgaaaattctcaggccggtattacacaatacgcggactaccaaaatatctctgattatgcaacaggatatgtcggtgcaatgacagccgcaggatatatcggcggttatgaggatggaaccatacgtcctaaagattatatatcaagagcagaatttgttaagattattgataatatgattaagctttacattacggagccaggttcatacggccctcagtatgccggcggaatagttatgataaagacgggcggcgtaactttgaatggaatagtcgctcagagtatagttatttctcctcaggtgagcggagatgttactattacaggttcacaggtttccggcagtgttgtaaatatgtccagaaacgctaatgtgtcttcaaatataagtaatgttgtaacgccaaacgctacagcaaaacctgataatacatatttcagacccaattcgggcggaagctcaggcggcaatgtttctccgtcatctgatgttaagcttacgttttatgtggattcaaaactttatgcaacaaagactataacaaagaatacttatttgcagaaatcaaacagacctgaggagccgtcaaaacaggggtttgactttgttggatggtatttgtcgcagaatcttgcaaatgacgcagaaaataatgaagcttatgattttgacagcaagagaataacaaaatctatgaagttttatgccggatttgtcagcaacggaagtccaactgctaatcctgaaccaacagcaactccaagttatgaacttgagtctgttgagatagacgatcaacctaacatatacgttggcgatacattgacagcaaatgtgcttccggaatcagccaaagaatatgtagtttatcagtggtacagggatataagcaccgaagcttttgaacctatagagggtgcaaattctgaaacatatagtgttcaggaagcggatcaaggacatattttgatggtagtagctactgctgcagcgccgtacaccggtgaaaagtttgcagaattagcatatccggttaaaattaacggtacagcttcaatagaaccgcaaattgtaaccattgattcaaacgatacagaagcatcaactgttataaaatttgctgaaaaagacagttttgatggtgtgagtttatccgataagccattgagcagcaatgattatgtctataattctgatacaaatacattgacaataaataaggattatttgtcaggattacaaaatggtgtttatgattttgttattaacacaacaaatacggatagtgataatcctgtatttagggtagttattgagaatagtgttgtgccaacagctgttccggaaccgacatcaacggtaaagccggatgaaccgacagcagagccaacagcaacggcaaaaccggaagaaccaacgccaattccaacagcaacggcaaaaccggaagaaccaacaccaattccatcagcaacagcaaaaccggaagagccgacaccaacaccgacagcaacagaaaagccggaagagccaacaccgacaccgacagcaacaattggaccggatgaacctactgcttcaccgacaatggttccgactcctaatcctgtttatatgtcaacagttagcgtaaccggcggaacggcagttttgaaacagccaaacggagagccgtatccattagctaaaggtgttaattataaaattgatgggacaaaaatatatcagccgggcgaagaagtttcagtgggtgaaaagttgaaggttacctttggaacagctgatgatataaaagataatgtgtttaacacggctgttgttgagcctgtaatgattggaggcgtaatttatgacgcgacatctacaggaactcagaatgctaagaattattcaagtgcagataaaggatcaaacggaaccccggacagtcctccaaacggcggtgcattctatatctttaagcctgctgcggacggacgtgttgaagtagctataggctggggacagactaagcctctcagtgtagtaagaattacggaaaatggtgtatcaggtgaatacttgactgacgctgtgaacggaaaagaatataaccatttaaatcctcaaggagagggtactcttcagacaacagtaacatttgatgtgacgagcggtgctacatattatttgttccttgatggttcaaagccgaatatttatggtttcagctttactgaatcgccgatagacacaacaaaatatttagtgcagcagggcgcagaagttgttgttgacgcagtatcggatgatgcggcaaaatatccaaatgtaaaagtagtggctgaggataaaacagatattgcaacggcaggcggaaagttcattatgcctggacagaatgttgatgtaaatgttacgttcggtgatactcctgacccaacagagcctccggcaagtcctacgcctacagctgatcatgatcagcctacaccgacagtggctcccgagacaccaactccaggaccgccgaccattcctccggctacatttgagccaacccaaactcccggtccttcagcgaatccggaaaatgttttaactgttgacggttcaaaggatacagatgaagctcaaaaaacttttaagactgtttccgaagctttggtatatgccggaaagctaaacaatcatgccagcgaggcggacagaatcgaaatcaatattgttccgggaacttatcgtgaacagcttgatataactgttccttatcttacgatgcagaagatggatggcacagaaggcgatgttctgctgacatggtattacggtatcggatacatgtactacagcgcagatacagacggatattacagcaaggaagcttatgagagaaataaggcgcttggcagagacgctcttaatcaggcagtagcaagatggggatgttcaacgcatttgaatgcgggcaacttcattggtaaagatttgatttttgaaaattcatttaacagatatgtgacagaagaagaaattgatgacggtgttaaaccggcaccggttggaggagtttacagcgacaccggcggtaagcctgaaagaactttagaaagcgatgtatatagcagatcgtttactgaaagagccgctgctatagcgatagaagataacgataaggttgaattttataactgttcattcaagagcagtcaggatacattgtattcaggttctaaaggaagccgtgtatatttcaagaactgtacaatagagggacagaccgactatatattcggcggaaatacacttgtgtttgacaactgtaactttaattgggcaggatattcaaagagcggcgagacagccggcggacatgtgactgcctgcaagaatgcttccactaagtatggatatttgatgtggggcggaaaagtatcaggtgcttctacagcaaatgctaattttgctcagggtgatttcggaagaccgtggggcggtaaagattcaccaacagccgcaataggtgttaaaattgataatataactgttggcggagcatctaagcctgctgttatggattcaggatggggcaactggtcgacagttgctaaagaatccggatactatgaatatggtacggttgacgcgtccggcaatccaataaatcttgataagagaaattgtctcgttccgaacgaatgggaagttctcgctatcaacccttatgattatttaattagagagggcgatgactgggatccaatggctgcaaagacaatgtggggaccggtaaaagagaagataaagacattagaacttcctgagagcgacacaatcaagaaattggattcagattcatatgaggtatcaggtgactttacacttccttcatttattgaaggatttgatggttatgatgttcactttgagtctgagagcgagtatttgaatatcagtgaaaacggcgaagtttcagttataagaccggttagtgatacaataccggctgagattactgcttatatcagacgttctgataataagcttatcggaacttccaagactataaacataactattactagagacccgtcaattgacccgtcagtgtttaatgcggctatgcaggctgcaaaggacgctattgattctaattatcaggaaaaagctgaaaacggtgacgctgtacttgacagaactgttgttattcctgaaatagattcaacaggtgacgtagccgttaaagtttgggctgaatattcaggatttattaatgatgacggaacaataatcagaaacccatacggagaaagtaatggaataggaaatgtaacttatactatccaatgcgtaaaggggtcgacattgctcaaagaaactgtatcatatgatgtatcaattcctacggataaagctgatatattgtatgctgattttgagaacaagacgacgaaaatcggcggaaacttgacagctatcggaggaggaaataactccggatatgcagttacaaatccgtctgagacagcgtttaatattatgcctttagccggtggtatagttaaggtttcatacgatgtctatggaaacacatccggcgttgtaacgcttaaagaccaggcgggagcggattatttagcaattgttcctgaaggtcttgaaagcggaaagtggaatacagttgaagccgttattaatacaactgataatactgttagtgtaacagtaaacagcggaaccccaactgaaactaccgcgcagacagcaataaccgaaagtaacagaatagcgtcgatttcatttgctgaaggcacatatgacaatattgctgtagcggcaaatactgataagtcaaaggcttattcaacattttggaaagctgacccgtcagaggtaggaacacctcagggcacatacctcatgagaggtcttactattctctattcaccggataagcaaggcaacggaggaacagttgacggcataaacttcccaatgggtctgtcaagcggctcaaataacggctcttggtcaaacggagttgttcctgacggaaagaacggactgaagtttgttgctcccggagacggaacatggacagtatatgctttaccaggaagcggaaagactttctatatgggaaatgccgagtcaagcgttagtcttccgggaaccaatgttgctgtaaaacaagatatagccgttgaaaagggtaaaacatattatgcaacagttgccggctcaaaaggaaacttcctcggttctaaatttacagcagcggttgaaggtgaagacgctgtagaagtatatttgacagctacttgggatttccagaaaaacaatggttttacgcaggttgtaaacgctggagaatcatatgattatacagtgaaggattcagagaatgcaggcaagaccatgacaataaaagctgacaccggaaaattcggcggttcagaccatggcgattggatagcggtaaacccagaggttactctaactgttccggttgttaacggaagcgttataactatgggcgacacatattatggaactgagcagtacacaataaacggtgaaacatttacaggcggtaataagtcgtatacttattatggtttagagaaaacaattgatattgttttgaaagttggaggattttatcgttctgtttcaattgtttcacctaagtatccgtcaacagaaataccaacggctaagccattgatggaaataaatggtatgattacaggattgacagctgctgacagttctgccgaaggaattaaactcattggaaaaatgggcggcgagctggttgctttagatattaaagacggaaagtttactacaactcttcaagcgggcaagagtattgatgttaccggtattttaggcggaagcagcgcatatacaattcctgctgacacgaaaataacatctgataatgctgcgccaactataaacgcggttgcagttgttgctgaaccggcagcgggaagcagaacatacaactttggggacggcagcatagttccgcagtcaactgcaattggatttgataccttagtagctcctgacggactgcttactttcagaagcgttaagttccatgatactcagcatggcgttcagcagagcgcaggcgcaatgacagtagagattcctgttgctgaaggcagctctgcaatcgtatttaaaggctgtgcttatgcttcagcaacaattacagcttctactgagggagtggctcctgcttcggcttcattaaagaccgctaacgatggggattcaattgagtttaactatagcggtgaggctaaaacattagtatttactattgacagcggttcaatatatgttcatggcttatctgttacaacaaaagatgcgtcagaacctaccgcaacacctaacttaaataagacggttacatttagtttaggagagacgggtgcagagggcgatgttccggcggctgttgaaatggcggcaggcgcagaggttgaaattcctgtaaacagaactgtttatcttgaaggcaagacattaacaggctggactgacggaacaacaactgttgatgttggttcaaagtatacggttcaggatgatgtgacattaacacctgtatttgctgataatacagcgtctctgtcaggaacggttgtgtatgatttccagagacagaacggaacacctacagttcagtggcagggtgttagtaatttcttagtatatcaagcagtaagcggatccgacaaaatagatgtgaaattcgtagttgatactacaagcggaaagtttgctaatggaaattggacagattgggcacaggttaatacaggaactaaatttacggttcctgtagttgagaatagtgttgttaccgttaatagtatttactcggaagatggaacatacacgattaatggagtaacaaagaccggttcaaaccaaagtgaaacagtgacggcggcaggaacatgcgatatagttgcaggcaatccaagcggaagctactggaaatcaattactgtaacatatcctgaatctacaaatcctacagcaacacctgcagcaacagatgaccctgatgcaacggtatcccctgagccaagtataactcctgagccgagcgcaactccggcttcaaataagactgttacctttagtttgggagatacaggagcggaaggagatgcaccggacgccattgaagaagcggttggtacagaggttgaaattcctgttaacagaactgtttatcttgagggcaaaacattgacaggctggactgacggaacagatacttttgatattggttcaaagtatacggtgcaggacgatgtgacattaacacctgtatttgctgaaaacacagaagctctgtcaggaacggttgtatacgatttccagagacaaaatggagcacctacagttcagtggcagggtgttaataagtttttggtatatcaagctgtaaatggttcagctaaaattgatgtgaagttcgctgttgacacaacaaacggaaagtttgctaatgcaagctggacagattgggcacaggttaatacaggaactaagtttacggttcctgtagctgagaatagtgttgtaacagttaacaatatttactcagaagagggaacatacactattaatggagtaacaaagaccggttcaaaccaaagtgaaacagtgacggcggcaggaacatgcgatatagttgcaggcaatccaagcgggaattattggagatcaattacagtaacatatcctgaatctttaagcccaacagaagctccaacagaagctccgaccaatccaccggttgaaccaataaatttcacacttgatttaactgatatacctgtaggtaatatagctaacggagagacagttgccggtttaaaagccgggctaggaactgcagcagaaggcgatatatctgtagctgaggtgaacggtgaaaaggtcattgaagtgaaagacgcagcagcaggacagaatagtgtaacttgggaggctccgagcgatattactacaggagttatcacaataacaactgaatttactgctataaatgagagctctgcggctgatattaatttcaatagggtaaatggaaagaattttgcttatttccaaaccaaatttggaagcacaaaatcaaaattttatttaaatgccggaaacaaagatgataaactaaaactgacaaaagataaaaaatataagttagtatctgtatttgattataatacaaataatgtaacgataacactttccgaaggggataatgttttggcgagtcatgacagtgacacggtctctgcgtttactgaccttgctgcacagggagcgatttcaaatatcatgatttgtcaaaccggaaacggttatactgccggtactgtttcagctgacttatatataaattcatttactgttagtcaagaattgtaattatcatcattttgttaaattataaaatatttataattaaatgttttatacgacaatagttttagcaaaccgtcagaacttttatagttctgacggttttttattcgtgttgcttaataacttaataacggaaacggaagaaggtaaagatgtaggcggactgcccaaatctctatggatcacatacgttttacaagcggagtcacgccttcaattcttaacatacaacatttgtaataaataattaaataattattttcttatgtacggtatttaaagtgaacatcggtagggtgtgcttgtgcacacctcgttaggtgaactgccatatcacgcgaagcgtgaacatacataaaaaagttttttagaatcccatttaattacaaactttaccacggctgcgcgtattacgcggcagatttcatctgtattgcgtattcatattatttaccttgcaggctaatctaaacaagtcactttgtattaccccatccttcaggtgggggcacagacattgtaggcaatgacaaaacaagataacatgtataacacacttttttaagaagagtgtggccacacctaccgatgcttacaaaactacattttatatactttttattatcccataacttgatttattacttaaaattgtaagaatataatgttaaatgtttacaatgattataaaaagtatatatgatttttgcgcattattgacaagatgaattcactgtgttatattgtattaagagaaacagattatgctttattatttagatatttcgagttttaaaggagaaatataatgaaaaaacgaatttctcaggtgtataaagtttgtatacttcttattgttgtattaatgtgtgtctgcaccgtggcatatgctgtctcaacatatattgatgagggaaatacaagctatagttatcgtcttgttccaacgggagttggcaaccaaaacgattattcgagcggctctggcggttatggaggaggatacagcggctcctcggattacggcggatacagtggaggttacggcggttacatgcgttatggaggttatggcggtaattttggcaacatttcgtttatatcaattggaattgtaatattattaattatatgtattatatcgattataaaaaataatagcaatgatgctaataccggcaatactgccgccccgtcggcgcctagaggcgggtatgttaaaccatctgtaaacccatcggttgagattcagcggacggatcctaatttttctgaggaggcatttcttgcatggacccgcgaagtatttataactttgaatgtcgcttggactaaacaggattggaaaatgataagaccgtttgagtctgagcagctctttagagagcattctcagcaattggatgaatatatccgcaacggcactgttaattatttggaacgtgttgctgtaaaagacagctttatcaataaagtttatcgtgatcaaagttatgaatatgtagaggtaaaaatgcttacaaatatgatagactatgttaaagaaacggcaaccggaaaaattattgccggcaatacaacacatttatgggaaatgattcatactttgacttttatgcggacaattggaacaaaaacatctgagcaccctgaatctttgagtgttaccaattgccctaattgcggagcgcctacagaaatcacctccgctggggaatgtccttattgcaagtcaattgtcacatcaggaacttttaattgggtactttgtaaatttattggtgaaaatctataaaaaggagatatagtaatgggacttattaaagctttttcaggagcttttcgttcagagcttgctgatcaatggaaagaatattttgtttgtgacagtatggctcaagagacgctgctgcagttaggacgaaaacgcattaacacaaccaactatcaatccagcaatactaaaggcagtgaacatataataactcaagacagcttgctggtagtaaatgaaggtcaggcaatgattgtgacagagcaagggaaaataattgattttacctgtgaagctggagcttatacttttgatagtaaatcagagccatcaatgctgaatggtaatttttctgaaggtctaagagaatcgtttcgaaaagttggcaagaggtttacttttggcggcgatacaggaaacgaccagcgcgtctactatattaacacaaaagagatattaggaaataaatatggaactgcacagccaatggcctatgatgacccatattataaaacggtgttatatattcgctattatggtatgtttacatttaaaattactgacccgttagtgttttataacagcattgccggaaacgtcagtgacacttataacagcgaacagcttttagaacaatgcagaagtgaatttctgacagcgttggatacgtcagttaataagctgtccggtcaaggtgtgaagttcagtgagattccttcgcaccaaatggaattatctgattttatgagtaatatattagattcctcatggaaacaggggcgcggcatggagattatctcggtggggattgaaaaaatcactccggatgacaaatcacgcgctagaattgaggagtttgacactgccgtgatgcttggaaacactcaaggtgctattcaggggcgtatgactgcggcacagtcagctatgttcgaaaatatgggaaaacagtccggcggcgttaatggcggtgatataaccggcgctgtggttggaatgatgggtatgaatatgatgaatacaatgatgcctaacagacaaaccgctgattctgataataaacagcctgaaatacctgtagttgattctaaaatgtctgatgatggctgggtatgtaaatgcggaaccaaaaaccatggaaaattttgtatagaatgcggagcaaagagaccgttttataaatgcggcaattgtggatgggaatcctcagaactaagcagtttgccgaaattctgtccggaatgtggttttccgtttggtgaaaaaacttctgtgaagagtgattaattgtatcaagttatttgaggcagcgcagctgcctctttttatgtctaattttagttagccgtgcatagaataataatatataaattttgaaattgttagattacaaggtttttttattaaattatcagttatgttatttttgcacgtcgttaagttcggaacggaataactagtttaatatcgttgaaatttaatttatctcagcttaaaatgttacaaaattattgctgataaaaatttgaaataattaatagttttcgtttttatgctagttatgcaattttttaaaatattatattttaaagtttgcttataaaacaaaataagtgtattattctgatttgcggcaaaatataaaatcaaatgagaaatagtttggagagtgagtgagagaacaatggaaagtgaagcgtttgaagaacctataatgaaagatcaaaataagttgtttaatattataaaaaagaaagttaatatttataattcaactgattgtataaaatgtttgtttgagggttttctaaaatgtcattacgagacaaaatttcacggcagaccggtgactgtagaatattcaatgacgatagataataataaatatcttccatatggaataaaagcgctgatgctggacaaggacttggagatagtcgatgaatttgcagccagaaagagatttgccactgtgagcgaatgtattgtacaaatggaaatgatggcaaaagatagagttttgcctaatgatttaaaatatattatatagtttgcttatttaatattgttatagtataggttatgtattctaaagtaatattgacaacaacagcttattgttttataattatatctacaataatgagccgccggcgggcggcaataatccaatattgaattttggagtgcgaaaatatgaaacttaatgatgctaatactgttgccgcaagtaatggtgttcataaagatataaataagaaaaataatccggcatttaaatgggcgtttattataattggcgccgttgttgtggttatgttagccatgtttttcattaaaacttttgttatatcagttgttacggtttcaggaaccagtatggaaccggcaattcgggaaggggaaagctggctgattaataaaacaaatcaaaactatcagaaaaacgatataattacattttattctaatgaagacagaaaaaatgctgttgtctcaagaattatcgctgttgaaggagatacggtttatatagattttaattccggagatatttatgtaaataatgaaatgattgacgagccatatgttagcgaaaagactaaaaccggaggaaagtatataacttccttgatagaagacggaaaatatggcgccggaactcctattgttgttgaaaaagatcatgtctttgtgatgggggataataggaacaacagccgtgacagccgggaattcggacctatatctacttcctctgtttttggaattatttttaaaaaaataaaataaaaagagccatatttgaaccgacctcctaatcgttagatttttggtctgacttttggggggcatatcaatttggctctttttgttatctaaaattacagcaatatgatgtcaaaaaaatgtttactgcatataatattaagcggtattataagtttagcgattcatattaatggataaattggtaaaaattgtttgatttttttaattaaataaaattattttattaatatattacgaaaaatcttgtatttattctagaattgtgttattataaacctatatgggacgggatttgtataaaattggtaagccacgaacttttagggggaaacgtaatggcaagaaagatttacaggggggagtataaccctgcacataatattgttaaaaaagagcattatgaaatatttaaaaatattcagcccaacaaaaatttgtggtatttgtttgtaaaaagagctgctgatattatttgttcactgcttgctcttatttttttatcacctttatttttggcggtttctattgcaatcaaaaaagacggcggtcctgttttttttatgcagcaaagaattggtaaagacggcaaagcttttcggatgtataaatttagaagcatggtcgttaatgctgaagagatgttaaaagagcttcagagtaaaaatgaagccagcggacctgtgtttaaaatagagaacgacccgagggttactaaagtcgggcgttttattagaaaatatagtattgatgaacttcctcagcttataaacattttaatcggtgatatgagtatagttggtccgcgccctccgcttccaagtgaggtagtcatgtatagtgaatacgatatgcagagacttaaggtaagaccgggtcttacgtgttattggcaatgcgggggaagaagcaaaataagttttgaaaaatggatagatatggatctggaatatataaatgaccaaggtatttggtgtgacttaaaaataattttaaagactatcccggcagtgtttaatggtgatggtgcttattgatcagaaaaataaatgggatgtggaattatgcgtattaccgttgcgggtattggatatgtaggtctttcaaatgctgtgttgctttcacagcataacaaggtgactgcgtttgatataaatactgatagagttgatatgataaacaaaaaaatatcgcctatagttgataaggacgtcagcgaatatcttgcaaataaaaatttggatttatgtgctgtaaatcttccggagacagcatttagcggagctgaatatgtaataatttcgactccgacagattatgatacaaagaaggattattttgatacatcgtctgttgaaagcgttatagaacaggttttaaaatattctgatactgctgtaatggttataaagtctacggtgcctgttggatttacagagatgatgagggaaaaatataaaacagacaggctgattttttcacctgagtttttaagagaaggcaaagcgctatatgataatcttcatccttcacgtataatagttggagaaaaatcaaaaagggcggagatatttgccgaattgttaaagcaaggggcagagaacaaggatgttccggtattgtttacaggttcgacagaggcggaggcaataaaacttttcgccaatacatatttggctatgaggatagctttttttaatgaacttgattcgtatgcggaaattaaaggactcaaaacatcagaaattatagaaggaatttgtcttgacgacagaataggtaaccattataataatccgtcttttggttacggcggatactgtttgcctaaagataccagacagcttttgagcaatttcggtgaggttcctaacagcattatgaaagctgttgtggacgctaatgtgaccagaaaagattttattgccgcaaggatacttgaaagagaaccaaaagttgttggaatatacagattaacgatgaaaactgattctgataatttcaggcaatcatcgattcagggcgttattcgaaggttggaaagttcaggagtaagtttaataatttacgagcctgtcttaagagactgcaaaacgtttatgggagcaaaagttataaataatttagatagatttaaagaactttcggatattattgttgccaatagattttccaatgagattgaagatgtaagtgaaaaggtttatacaagagatatatataggagagattagacagagaggagaaatataaatgactataatcgaattttgggacgagctgggaattgataaggatgaggtgtcggcaagatttgtcggtaatatggatttggcagcaaaatgtactatgaagtatatagacgataacacttttaatgagctccaaactgctatggctgaacagaattacagcggaattgagatagccgctcatactttaaagggagttgccggaaatctaggctttagtgagattcagaaaatcggacagagaatggtggataatgttagagccaatatttatgatagtttggatgaagattttgaaaaacttaagattgaacagaaaaaagtttgtgagttggcaaaacagctgtagtgtttaatatagctgggaggaggtgcggctgtgcctggaaaattaaaagttttggttgttgatgacgtagagatgaataggattattctcagtgaactttttgctgatagctacaatgtgctggaggctgagaatggggaagaggcgttggaaacgattaggaataatcctgatttatccgctgtgcttcttgatattgtcatgcccgtaatggatggtcttgagacgttggaacaaataaaaaaagaggggctgataccatctgttcctatattttttgttacagcggacactagtaatgaaaccttagtcagagggtttgagaatggcatagtcgacagaatagaaaagccgtttaacccttatgttattaagtgccgtatacaaaactcaatagaactttatgattatcgtataaacttggaaaagcgtgtaaaagagcagactgaagaaatagaaagaaaatctcaggagcttaaagaagcaaatgcgtctattattgacgctttatctacggcgattgagttccgtgactcagagtcgggtgaacacgtatgcagaataaggcagataacaaaaactcttttaattgagttggagaagcaggtaggaaataagtggtatgctcatgaggagattgaaaatatttcggcggcctccacaatgcatgatgttggcaaaatttccgtgcctgactatatattaaataagcccgggaagctaactgcagaagagtttgaaataatgaaagaacacacggtcaacggctgtaaaatactggacagtatagatatgataaaatgcagtcctatgtacaagtattattatgatatttgcaggagccatcatgaacgctgggacggccgcggatatccggacggacttgttggagacatgatacctatatccgctcagatagtttctgttgccgatgtttatgacgcacttacgagcaagagggtatataaacctccgtattcacatgaaaaggcggttgatatgatattaaacggggaatgcggaaagtttaatcctgatattattgagtgcttaaaaaattgtcatatggagctaaaagatattttagataaaatggcctttgaaaacaaagtaaatatagaaattccacaatatgagaggaaaaaagtgagttcaaagctcgaacttgaaaactctgaaaattttgataaaacatgtaaaaatgataatgctgataaagaagacagttttacagttttagatgatgatgtgatttttaaatacaataaaaagaatgatataattgaattctcggaaacctatgctaaagagtttggaaaagcaaggttgattactaatgcgcagaaatttttctatgaggatccttcaatgaccccggaggagaaagaaaagttaatgaatagtgtgaataagcttaatattaataatccggttttaaattgcaggataaaagttcgggataaaaacggaagtccggtaagccggaatattagtatatatatgcactattccaatgaaaattccggtgagtcagatgggtttgtcggtaaacttgtaaatagttgagtgttatatacttagagataagttttattcaagttaattatagtcatattgtaaatagttttatgaacggtaactaacgttttaacatattggtagaaagagtgaatatatgaagagtaggacggatattacaagaagtgagaaaagcgctaaaaacttgttatatggcgtcatttctcagtttgtcagcgttgcatttacatttattgtgagaatcgttctggtgcgtcagattggaattctgtcagtcagcttaaacggtttattcacagaggtaattgcaatactgtcacttgccgaaatgggtgttggttcggctatagtttacagtctttacaaacctcttgccgaaagggacgaaaagaagattgtaaagctgatgaatatgtataaaacagcctaccgtaatatagctttggctgtgtttggaataggtctctgcctggttccgtttattcagaatattgttacaaaggtcgatgtgtctgacggatatattcggcttgtttttgtgttatttctaactcagacagcgtcttcttatttattctcatataagagttccttgcttaatgcggatcaaaaggtatatatagtttcaaaggttactactattgttaaaattgttgctgagattattaacataattcttttatttgtttttcataattatattttatatctgattgtggaaatattgcttacccttgccaccaacatagttatttcaggtcaggtagataagatgtatccgtttttaatcaggaaagacgaacttctgaacgtcgaaaagcgaatggtatttaaaaatgtaaagaatatttttattggaagtctttcaggtaaaataactaattcgactgataacattttgatttctatcctggtaagcacttatgaggtcggtatttatacaggatattcgacattggccatgggactgagaaaacttattgaccaggttgacgccgcgacggctggaagcgtaggcaatctgatggctgaggatgaccgtgataagtgtgaccaggtgcttagaaagttaacatttattaattatttttttggttctttgtttgcaagctgtctttattgtctttcgtcaacgcttgtcaggataatgtacggattggaatatacgtataatgcagattctatgattggtctgatggtagtattttgtttgtgtgtaaactttttcttaaccgtgttaagaaatcctctttggaggtttatgtccgtatccggtttgtttgccaaggataaaaatatttctatagcaggcagtgttgtcaatctaattctttctattattcttggaataaagtttggaactttaggaattcttttgggaactttggcgtctctggtaatacaaattattttaaaaatacgtctgctttatactgaacgctttaaaatcaattccggaaagtattattttagatttatattttactctggaataggtattgttattatgcttttagcgaagtttataagcgcagaaattgctgtcggcagtttatacatagattttgttttaaaggcggcggtatccatattcgttccattgtgtatgaattatgtcttcttttgcagaacagaggaatacgtgtatttaaaggaacttatgtggaagtttgttaccaaaatgtataccgcactgacgcctgttattagccggttatataaaaaaaggccgtttggcaaggcataatattgaaaggtgttgctatgatgcggaaagataaaaaaagatttaaagtcgctatgattggacataaaagagttccatcgcgtgaaggcggtattgaagttgtggtagaagagctgtcggtacgaatggttgaaaggggtttaaaagttgacgtatataatcgcaaagacagatttggcaaagcgtataaacagcctcgggaatataaaggtatcaggataattcaaatcccaacttttaaggttagcgctttaaacgcctttgtttattcagtgctggcaagttttcgtgcgctgtttggaggttatgactgtattcattaccatgctgaaggaccgtgcgctatgatgtggcttcctaagctttttggtatacatacggttgccactatacatgggcttgactggcagcgtgccaaatggggcggcttctcaacaaaatatctgaagcttggagaaaaatgtgcttcaaaatatgctgacgaattaatagtattgtcaaataataaccaaaagtattttaaagaaacttatggacgggatacacacttgattcctaatggcattgtcaagaaaaatgcggattattctgctcgggaaataagtgaaagatttggtctccaaaaagacggttatattttgtttttagctagaattgtgcctgaaaaaggtttgcattatttaattgaggcttttaaaactgttgagacaaataagaagttggtaattgccggagatttaactccgggtaatgagtatgtggaaaaaattaagaagatggcgtctgaggatgagagaataattttgaccggctttgttcaaggaagattgctcgatgagttgttctcgaattgttatatttatgttcttccaagcgatatagaggggttggcaatgagcttgctggaatcggtgagctatggcgttccgtgccttgtcagtgatatacctgagaatatggaagttgtaggcgggtatatgccttcatttaagcatggagatattcaggacttgtcggttaagctggataaaattttaaaaggcgaatattctgatatatggaaaaaagaaaattttgaaactatcttaaaaaaatatgattgggaaaaaattgtagatcaaacgacagcgctttataaaaaaggaaaataatttggtggtatagcgaggtgcggcgaatgaaaatattattaataaataagtatctgtatcctaaaggcggtgcagagacatatactttaaagctgggtgaatatttgagcggagccggtcatgaagttgagtattttggtatgtacgataagaataatgtggtgcataattccgcagagcaatacacacaaaatatggactttcatgacagcggagcggaaaagtttctttatccgtttagaataatatattcatttcaggcaagaaaaaagctcagaaaagtgcttgaaaattttcagcctgatattgttcatatgaataatatcaattatcagcttaccccttcaattattgatgagataaaaaagcatggaactccaattgttcaaaccgtacatgatttacaaatgctttgtcctaatcatcttatgtttgacctatataaaaagaccccctgtgaaaaatgccttaacggctcaaagataaattgtattaaaggaaagtgtatacactattcaaggattaaaagcataatcggtgcagttgaagcgtggctttacgctattaaggggacgtataaaaaagttgataaatatatatgtcctagcaggtttttagaaagcaaacttcttgaaaagaaaaggcttggcgaatatatatataaaggaaaaacagtttcaatacataactacatagaacttccaaaatttgattttgaacacacaaaaaagaattacgttttattttttggcagattatctgaagaaaagggagttgatatatttattgaagcctgcaggtcccttccaaatattatgtttaaagttgcaggggttggacctatggagaatgtttgtaaagggattcctaatgtggaatttgtggggttcaaaaccggaaaagaactgcataaattgatagcggaagcgctgttttcaatttatccttcaatatggtatgaaaattgtccgctttcgattttggaatcagaatcttttggaaccccggttatctgcacgcctctcggaggaatgcctgaacttgtagaaaacggaagaacgggaataattcttgaagaggttagttccaaagctttgactgaagcaataagcacgctttataatgacagagaattatgtgaaaaaatgagtaaattttgtgaggaaaaaagaactcaaatgacaactcttgacgagtatggcaggcagatagaagaaatatattccgaaattataaaaaagtaaaataactgaaataagcgcggaattatccgcgcttttaatttatcctattatagcttggccaataactcggcccattttttctcttgaaaagtttgttaaaaatgaattccttgcattttctccgatataattatatttgtcagtataaaaaatatcagagataactttatgtacgcttgatttatcttttgttataagcagaccgttttcaccgtctttaatatacatttcactcaaagtgcttggctttgtaacaattattatttttttaaatgacatggatgtcagtaaaactgtatctcccgaacatattctgccgtcgtctattggaagaatcacggctttagagtttattataaatggatattgcccgtctccggttatatcatctattaacaaaacgttatcgggcaaaactttaggtttaaacgtgtctgatattataacaagagtttcgttaataccctgccaggaatgcaaaagaaagttataatccctgtttgaccgtccaattgccaacacataatctgttgattttatcttttcaggtttttccgaatctttccattgaccgtacatatcgtttattccgaaagtagtaacaataaacttgctgagtggtatattaaaatcccggctgcattgatttgcgtagttttgtgacggaacgtgtataaaattaatatagtctccgctgagacaggttttcataaaccatttatatattcgtcctgaaaatcctgatttttgtttatatgtaaaatttataacaacaactttatttttctttttagtcctaaaaattctgcaccaaaagcagaataccaaagcgtaaaattgctgccagcctaaaatataatcatattggtcacgtttaagaaaatacaaaaaggttatataaaaatacattaaataacgtttgataacattaaaaattcctctgctcccccagtttgcaattatagatttacactcaaaattgaggtcagtttccttgttaagaccgttgagcagggaggctacttcgtcagttacacaatcggcaagcactatattctttttcatattatttctccttatgatatcaaactctttttattttacaaaataaatttccaattgtcaacataaccgggaagttattcaacgaataatataaaactgaaaacttttgaaaagggaacgttttttgttatatattcagagaatattgtttaagacgcttgcaataacgcctaaatagtggtataatatttaaaataaatatcaatgatttggtatttaaagaataaataatacggcggaagcagaaacgacaggtggtagttaatgagtcattttaaaagattgattattcgcgcgcctaagtatatatggtaccttttctgtttggttatattttatccaatagggagaatagcaaaagtcttattcccaaaataccgtgatgtttggatagtttctgagcgcggctcagacgccagagataatgggtaccatttttttaaatatataagagaaaatcatcctgaaattaaagcgtattatataattgaaaaaaaatcggcggattaccataaagttgctaaacttggtaatatcgtcaaatataaaagtttaaaacatcattttctctttgcagtttctgaatataaaataagcagtcacatttttggatattcgcctgatgtgttgagttacaaccgttttcagaaattgggtctcatcaggggaaagctggtatttcttcagcatggtataatagttaatgatattgagtggatgttttatccgaaaactaaacttgatttatttgtttgcggagcacgtcctgaatatgaagcagttattaaaagatatggatatcccagcggtgtcgtgaaatatctcggattgtgcagatatgacgctttaaataaaccgtgtgttctaaaaaatagaatattattaatgcctacttggcgtatcgacgtgtgtgcggtggggaaccgtgataagtttactcaatctgagtattatagaaaactccaaagttttattaataatcagaatttaattgattatcttgacaaaaacgaccttgaacttgttttttatcctcattttgaaatacaaagatttttaaaagattttcattctgtgagtccgagagtcataatcgcttcgtttaacgactatgatgtacaggaattgcttatgaattctaagatgctgattacagatttttcaagtgtattttttgattttgcatatatgggaaaaccaatagtttattatcaatttgatgatattcattattcacatggttattttgactatggccgggatggttttggtccggttttgaagaccgaagatgaggttataaattatttagcagaaaaggtgaacgacggatttttagttgatgatatgtataaagcgagagccgaaacattttttgagattagagacgataacaactgtgaacgtaactttaatgcaatattgtctttgtagaaagtttggccggctcgaatcaacagacaaggagaataatgtttatgtctaatttgcagaacaggcaaaattctaaaattcttgcggcgttttatattgtctgtttcgctttggcggttgttcttgattcgggattcggaagcagtaatgcaaaagcaataacgctggttacagttattcttgcagcggctgtaatatttattacggcagattttaataatctcggcaatatatccggatttatggttgtgtatggaatatggcttactgttgtgcttgtttattcctttataatatggatacttaattttgaaacagtgtcatatatgatgaggggctgttcaaaaatagtatttcagtttataatgatacttaatatatttgccgcagcatatttgtttggtgaaaaaggcatacactatatgttctgggggctggcactgggcaatcttgctatagctttggttttggttccgcggtatccgatttcagaaatagtatcatctgtaaccgtttttctaacccagggcggaactgcggaaggatatatgaaagggttagaaattcatgatgtaacgtttacttatggattttttctgatttactttattttctttgataagataagttcaaagaagatgaaagtcataaatataattttggctttgtttttgttcggtcttggatttaagagaatcgctatagctagttgtattttaatgctgctggctgcatgggggcttgaaaagcttactccccgtgtgcagtttggtataatgaaaactatacttatatgcggagtgattttttcatttttatatttattcagcataaaatataatatttttatgatgataatggataaactcggtgtggatgtaatgggcagaaatgttttatatggagctgttgacaaatattataagatttctccgacttatattggtcacggctttgagtatgtccatatgatgatggcagaaatcaggcaggaaggcggtaaagcctttaacggcatgattgacttgcataatgattttatgcgtgtgtatattgaaatgggattttggggattttttgcctggggatggtatactctgatttttcaatataattggataaaatcaaagtttggactggaaacggtaagattattttttctttgtgaattatatatctttttgacttatatgactgacaatacattattttatttctatacaggaaccgttttgcggctgattccaatgtgttatgctcttcacattggaaaggagaacagtttgggaaaagggaagcttaaaagaaagcttgttgttttaaatgatggggaaaagagtgaatttgagattttatcaaagcgcggagaagaaagtgtaactttatataagaaaaagctaaaccataaactgcggtaagacgaaagtcttgtcattattactaagttgggtgattttattgataatttttgaaaagttaaaggaatatattaaagaagattttggaaaattcaaaaatatgaatataaaaaaatctgttttgaataaaaaagaatatatggaaaacacagctgtagttgtagaaaaagaccctgctaaacttggactttcatcgacaaaaactattgtgtttttgttatggaaaaagaagtttaaaattattttttctacaatagcatttatgctgattttgtgtgtcttttttgcatatcaaagcggaaacaccgtaaatactacaatgtctttgaattatgaggagggttctaaaggtcttaatccaaattcaacaagatttaatatgtatgagctaaaatcaaatgcggttttagaacgtgcgatacaatatttgggactcacaggagatataactcctgagcagctttcagagcatatttctgtagggaacgcaaattcaaaagctattaataccgaggagagcaattattttatctcaacaagttttaatgtttcatataccaaaaataaagaagcaaaaaaatattctgctaaagatattatgaccatgatttgcaaagcttataatgatgtatttcacgagaattatgccgataaaaagactgcgcttacttataatatggatgatataaccgatatggaatatgttgaaataggcgatgagcttacaatattagcaaatcaaatggatgagtatttgtccggaagagtttcagaaaatggtacatataaatcagtagagacgggacagacgttccagacggtaaagagaatggtacaaaacttgctggaatatgacatttcaaaatataaatcgtttgttcttgaaacaggtcttgctaaggaaaaggagcagtttattcagactttgtattataaaaattctgttcttgatatgcagtatcaaaaatctatggcggattacagtgtgcgtcaggacggcatatcaaaatacgatgaagctatgataggaactgttatgataccggctgtcaatgagaaaaacgaatattatatgtctagaaccaatataggtattgattatctggctaaagatgctgaatttcatttgtcagcggcaaaggacacgttaaaagaaattgagataaatacagatataataaataagttaagtgagagaactccggctgttggggattatgaaaaggctgaggaaatgctcaaaaatataaataatgagtttaaaaatatttctgagattgcacttgccacagacagggaatatattaaatataaaactaaggattatttaacatttaaaaatgtagagctatctttagttcagaagttatcacttaaaaaggtaatagctttgggcgctgtattttttgttttaatttgtgctttgttctattttatgagcaaaagaaagcttagaaataggagggcgcacgtatgagaaactttgaaattttaagatatataaaaaaatggaaatatttgattgtgattgtttgtatcttgggcgccgttctcgtttatcagtatgctatgtcaaaacagacgtatacggcgcagactgttttaagatattctaattcagaggcaagcaatggtttgactcccagcggagatagtttggatgtcagtgagatttattcgtcaaaggtaataaccggtgttcttgaggatttggatttaaataccggagctgattctattcgttctaagtgcgctgtagagccaattattccggcagatgaagagtcaagaaaagaagcgatactaaaagacggagaagaatatgtgtatcatccgactgattacttagttacgttcagcgttggaagtgattacagcaaagggtatgctgcaagcgttcttgattctattttaaaaaattattttattaattacggagaaaaatatataaatcagacagttttgccgaataatgcttcaaatattgaaagcggcagttatgattatattgagagcgcagaaatcttggatacctctgctactgatatttataattatttgtatgacaaaaagtttcattatccggcttttaggtctgcggctacaggatattcatttaacgacctctataatatgtataaagaggagctgaactataatattcctgagttgtactctaagattttaaatcaaaaagtgtctaaggaccaatcagttttgattaaagattatagaaaccgaataagccagtatcagattgatttagctaacctttcagaaaaaatagacccgctttatgctcttataactcagtacagtcaaaaaagtaaggagggtatacagtaccactatggaaagggtactgattctgataatacaagcgattatatattaaaggatgtatatgaagatgaatacaaacatcagattaatactgaaactacatatgacgcacttataaatcagtatgtttctcttgaaattgaccgccagtatacgcaggttgataaagaacacagagaagaacttttaaatatctttgaaacggctgagccggcttcaaatgctgacgaggcaataaaagagatacaaaacaatatgaaagaacttattgacagtctggataagaattatgaaattgttgaaaagacagtagatgaattcaatcaatatctaggcgcgtcaaatattacttctctcaccagtattaatgtgaacgagagaataaatattaagctttatttaatgatagctgtagtgttgttcttaatttgcggctgtctcggcgctattttgctcggtcgtatgcaggactttattgaatatcttatgtatatggacagaaagactaagctgccgaatcgtgcaaagtgtgatatgctgataaatcagtatgaagaaaaaccgttgcctgataactttacctttatacttatccgccttgatgttttgaaggcagtaaacagtcaaataggaagaacagcaggcgatactctgcttggagagtttggacagattttgcgtgagactgctgaggactacggttttgtaggctataatggaagcgaccagtttatgtgtatgtttgaaaattgcagttataaaaaggccgaaatgtttattgatgttctgacgagttatgttgagcattataattcccaaaatccaaaacaggatatagcattttcttatgctattgaagaaacaagaaataagggtatatatgacgcaagaggtttaataagcgcatcgttccgcgatataaatgcaaatacaaatattaaaagtgaaagagcagaaaattatgaagacagagatgacggcggagacgatgatggacccggaggcggagtaaatccaaagaataagtctcccaaaaacggacctaatgacaacagcacatgtgcaggcgatacaacgataagtaaaaattcacaaaaacacagcaaaaataaaaatcacagtggttcaaaaaaaagtgttgttaagcatactaaaactgtcagccaagatgtcaaaagcgatatttatacaggttcagaacagaatagcagaggagtgtataatgaggagatagttaagctggtaacggatgctgttatggcaggaataagggcggaacgtgcgtctgagaaaaaagaaactattcccggacgtccctccgtcatcaaatataactcaaaaaatatttcggatagctatccttctattgagtggacggattctaagaatgataagtcgaatgtgaaatataaggctgtaacagaaacggtgtctaatgttaataaagataacgtctctaattctaaagaatctgttatgtcaaaacctgataatattaaaagcgtagatgaaccaaaaaaagatattcaggcgaaattgaatactaaagttgaacacgatatagtttctgatacctcagaaaatatcgaagaagttaaggttcttgtaagagaaagtacgaataatattaaagattcaagcgtcatatcgaaaattgatgataataatccttatgcgcctaagccgagagtgaaaaaatcatatcggagcaaaaagtctgaggagccaaagagcttgaatcttgatatgtatgctccaaaaaagaaaaaataataaaatcagagaccgttatattggagagataagtctatgaagaaatactttgaattgttttcaaaatataagtggcgtattattgcggtaatattgataattgtcctcgcagtctgtgcgtttaatttactgaaccaatctgaaatagatgtaacattttatcaggtgcgttcagataaggtttcagacaatatccgcatagtcgtgcttgcagatttgcaccttaaagagtttggtaaggataatataaggcttgtggaacagattgataagctgactcctgatattatagcatgtgtgggtgatatgaataatctgaaaaatgacgattacagcgttgtgacaaatctttgtgaaaagctcgtgaatattgcatctgtttactatgctttgggaaataatgagtacgaggctaaattatttaaagattctaatataaccaaagaccttaaggctgttggagtacatgttttagacgacgcgtctgaaatagttgacataaaggatacaaaattgaacataggcggactttctcagggaccggagcagtttgagagatatggtcatcaattttttgataagtatattgaggaagattactttaaacttttactggttcactatcccgatgagtttatgggaattttagaagattatcctatagatttagctctttgcggtcatgctcacggcggtcaggtgcgaattccgtttgttgggggactttatgcgacgggacagggattcttccccaagcttgttgatggttttcatcaaataggaaacagtaatgtgattatcagcagagggcttggaagctcgcatattattccgagaatcaataataaaccggagctttgcgttgtagatttatgctggtattagtataggggactggttatggaagaacaattagttagtattatagtgccggtttataacatggcggaagtattatatacttccgccaagacttttataaatcaaacttataaaaatttagaaataattatgattgacgacggttctgctgatgacagtttaagagttatgcagcaattggcagctgcagatactagaataagagtttatcatcaagaaaaccaaggagcagccggagcgagaaacacaggaatgtcacatgcgtccggtaagtattactactttccggacgctgatgatagaatcaaggaaaacgccgtggaaaagcttgtttctgctattgagaatactggggctgatatggcggtttgcggatatgaatgggtgaacggccaagatgaatgtataatgagaaaatcgtataagcctaaatatttcagcggtaaatatattcgtgaaaattatgatgagtttattgaccgtgacagtgaatatggtatatatggcagtatggcgaacaagctgtatagggctgagattataaagaataatgaattatctgttcctaaaatcagtaagagcgaagatgaagcgtttaatattttgtttctgtcaaatgccggttcggtatgttttattgaggatgtgctttattattattatatgtctggaatagttaaaaagggagaaaagtatttaaagaattatattgaaagcgttgcagcttttaaaaatttacagatgaatgtagtttataattggaatagagacaataaaaaagttttggagaaaatatgcagaaatttggcggtaaactttgatatatatattcaaatgctgtttctcgctattccaagatataaagtgtttaaaagatataaagcggtaaaaaacgttgtggaagtttttaataatgaacttccctgcagagagtttgagcctgattttagaaagtataaatatttagttgataaaaaaataatcaggctttgcattattgaggatttaaaggtaatgagtgaaataaaaaacaacgcaaaataaaacattgggagatgaatgttatgcaaaaacctctcgtaagcataattatgcctgtatataatatgggtgaacatttaagaaagtcggttccgtcggtacttaatcaaacttatgaaaatattgaacttattcttgtggatgacggttcaaaggataacagtctggaagtgtgcagagaactggcggttaaagataacagaataaaggtttttcatcaggacaatcaggggtcgggaccggctcgcaataccggaataaaaaatgcagcaggaaaatacgcttattttccggacgctgacgattgtatggtgccgaacgcaattgagtcgctcatagaaaagtttgaaaaatatttctgcgatatgatagtgtttggttataaaatgatattcagcgatgggactgaaagaaagttcaatgattatccaaacgatgtttttgccgggagttatgtaaggcagaattatgatatatttacaggagataaacgcaaatgggaagttcagggggcgccgtggaataagattttcagcctggatataattaaggcgaataatgttgagttcccggctttaagacggaaccaggatgaagtttttgtaatgcgttatgtgaattcggctgaaaagatagccttaattgatgagatattttatattcattatcccaatgatatgcggctggcatttaataaattcccgattgattattttgaaatagtcagcagtttgaacggattcagaatggaatacatatatagctggaatcctgagaatcgtcaggtattgaatgatatttgttcaggctttatccagagcacgacaaaaagcatgatgcttctctttaacccaaaatgggagttaagctttaaggagcggtataaaagatttaaagaaatttctgtaagatgtgtaaaagagctgccggataaagattataagtctgattctacaatgtttaaacttatgaaaagcaagcattattttttgctttatatagtagtatattttgcgcttagaaaaaataaaaaatatataagataagaattagataataatatgcacctctaaaagttatacgcttttggaggtgcatatttttatgataaaaagcggaaatctactgagtgagtcaatatttttattttttaaagtaccgaaaaacctatgtataggaaatataatactagcaaagcgaccccctgaaatttgtaaaatttctttttaagcatcggaggcaggcacgcaataagtataaatccaagacagattggaatatcaagcatttcatactgcggttcaaaggtcagaggtacgccgaactttcctgttgatataaatgagcatattggtattattaatgaaaggtctattatattagctcctattatgttacctattgacagactgctgtgttttttagcaatggcggtaatagtcgtaacaagttcagggagagaggtgccgatggcgataattgtcagcccgataaccctttcggatacacctaatgcttttgctatatctgtgcctgattcgactaggagtttggctcctactgtaattgctgcagcgcttagcacaaataatgatgaatttataaaaacctgctttttagtcggttttattataggtatcgccggaagtattatatttccgctattggttttcaggacagagttttgttttgatgatgaaaggttgttccaagtaaatataataaccactccaaaagcgagaaggcttccgagcgcagataccgtaccgtttttacatatcatcataaggatgaatgctgaagatatgagacatatcataccgaatttaaaatttttggtttcaattgttgaactcagaaatattatgcttatagccataatcattgctgtattggcggtcacagacccgacggcgttgcccatagctattgagttgttgcctgaaaacgttgcaatggtggaaaccaaaatttcaggcaaggtggtagctatacttacaattgtcgcgccgattataaactttggtatgttaaatacttctgcaatccaaacggctctgtccacaaatacatctccgccctttattattaaaaacaggccaacaagaaaaagtaaaacagtaatagtcatttaaaagttcctttcataaaataaaaatattttgccttaaatgtattgaaatactttctattatatagtataattgtttccttgataaaattcctaaaatgtgcaaggagatgtgacatatgcaggataaaattaagctttatgcattcaacaatctgacaaaaactttgagttttaatatatatgatgtgtgctatgccaagagtgagcgcgaacaaaaggattatattgcgtatattgacgaacagtacaattctgagcgtctgacaaaaattctatgcgatgtcacagatattattggagcgaacgttcttagtatatcaaagcaggattatgaccctcagggagccagcgtcaatcttatgataagcgatgagtctatgattccttcacagcctcctgttagccatattacggctgatgaggttatgctgcatttggataagagccatgtaacagttcatacttatcctgaataccatcctgataatgctatttcaacttttcgagtggatatatgcgtttctacctgcggtaaaatatctccgcttaaagctttggattatttaataggcagttttgattcagatatcataacagctgattatagagtcaggggatttacgcgcgacctggatggaaaaaagctgtttattgatcatgatattacttcaatacaggactttatagacagaaaaacattggagaaatatgacgctatagacgtaaatgtttaccagtcgaatatttttcacacaagaatgctgattaaagatatagatttgcagaattatctgtttaaaactgatgtatatgagttagagcctaaggttagacttgacatcagcaacagtctcagacgtgagatgattgagattttcagcggaaagaatatatattagggggactgatggtttggagcaaagcaaagcccctatttatgaggcgttaaaaagatttaaatcaatgcgtgttgtgccttttgatgttccgggacataagcgaggcaaaggaaatcctgagctgacctcatttttgggtcagcagtgtatggacgtagatgttaactctatgaaaccgctggataacctttgtcatccggtgtctgtcatacgtgaagcggaggaacttgccgctgaagcgttcggcgcaaaacacgctttctttatggtaaacggcacaacaagcgctgttcaggcaatggtttttgcggcagtaaaagaaggagaaaaaataatacttccaagaaatgttcacagaagcgctattaatgctttggtcgtgaacggagccataccggtttatgtaaatcccggagtgaacaaggcgctggggatacctttaggaatgagcgtaaaggaagttgaaaaggctatagaaaacaatcctgacgcaaaagcagtttttgtaaataatcccacatattacggaatatgcagtgatttaaaaaaggtagtggaaatagcgcacagagccggtatgctggttcttgttgacgaggctcatggaactcacttttattttggtgataatctgcctgtcagtgctatggaagccggagctgatatggcttccgtaagtatgcacaaaaacggtggttctctcactcaaagctcatttttgcttataaataactatgtgagcgaggggtatacaagacagattataaacctgacccaaacaacgagcggttcatatctcttgatgtcgtctcttgacctttcaagaaagaatctagctttgaacggaaaggaaatataccgaaaggttttggaacttgccgattatgccaggggagaggtaaacaaaataggtggatattatgcgtttggcagggatctggtggatggagacgcaatatatgattttgacttggccaagctttctatacacaccagggatatagggcttgcgggtatcgaagtatatgacatgctgagggattattatgatattcaaatagagtttggcgatatagggaatatacttgcgattatttcagtcggagatactcctttgatgattgagcgtcttatttcgtcgctgagtgagatagagaggatacatagaaagccaagtgccggaatgttcgaccatgagtatatttcacctgaagtgataatgacgccgaaaaaagccttttattcggataaaaaatctgttcctatagagaagagtgccgggatggtatgcagtgagtttgttatgtgttatcctccgggaatcccaatattggctcccggtgaaatgataacgcccgatatacttgattatattgcttatgctaaagagaagggctgttttatgaccggcgccgaggatataaatatagattatataaatgttatttagcagttgataaaaggggtgaaaagatggaactgtggtattctgagaatcatagcgaagatgtaaaattttcaataagggtagacaaacaattatataccggaaaaactgattatcagagaatagatgttatgacctcaaaggagtttggaacatttttaacgcttgacggcttaatgatggtggctgaaaaagacgagtttatttatcacgagatgataacccatgtgccgatgtctgttaatcctgaaataaaaaatgttttagtgataggcggcggagacggaggcactgtaaaacagctggtgcggtatgaaggaatagaaaatattgatttggtagagatagacagggcagttgttgaagtttcgatgaggtttttccccggtatgagagtggggtttgaagacaaacgcgttacggtgtattatgaggacggtttaaaatttatcaggtcaaaaaggaatgaatatgatttaataatagtggattccacagacccgtttggtcccggtgaaggtctgttcacaagagagttttacggaaactgttcaaaagctcttaatgagaacggaatatttgtaaaccagcacgaaagcccatattacgataactatgctaactctttagttcgggctcacagcagaataaaaggggttttcccaatccataagctataccaggctcatattccgacctacccgtcaggtcactggctgtttgggtttgcgtctaataagtttgaccctttggaggatttggacgctgacaaatggaataaattggggataaagacggaatattataatactgacctgcataagggcagttttgcccttccgaattatgtaaaggagttgcttgagaatgcctgataatactattatatcaaatctgccggtttttttaggctgtgacgctgagtatgaggagtcaaggatatgtgttttcggagcgccgtttgattcaacgacatcattcagaccgggaacgcgttttgcacctcagaccatgcgagccgattcttggggtcttgagacctacagcccttatcaggacagggatttaaccgatacaaaaatatttgactgcggcgatttagaacttccgctgggagatactgagcaggtgttatcaataattgaagattttgctgctgagatcattaaagaaaacaaaacccctgtgatgattggcggagaacatttagtcacgcttggcggggtaagggcttgttatgataaatacggcgatgatttaagaataatacactttgacgcacatactgatttaagagatgaaatgttcggagtggaactcagtcatgctacggtgatacgtagatgttcagaactcttaggcgataaaaagatatggcagtttggtatacgaagcggagagaagtatgagtttgagtgggcaaagaaacataatactataaataagtttgatttaaatggtcttgacgacttaatatgtgagttaaaggaagcaaacttgcctgtctatttcactgtggatttagatgtattagacccttcggtatttccgggaaccggtacgccggaaccgggcggcataagttataaggaacttcaggacgcggtgattaaagtgtgcggcggtctgaatataatagcagctgacgtggtggagctttgtccgcattatgatcaaagcggcgccagtacggcaattgcgtgcaaaatattgcgagaattacttttagcgttgagcggaagatagaatatgtttttaggaggataaaatgagcagagcattgataattggagccggcggagtggccggtgtggtggcacataagtgctgtgaaaattttgaagtcttttcagatattatgatagcgagcagaacgaaggagaagtgtgacagcctgaaagaacgctgtgaagagtataagaaaaaagtcgggagcggcactaatatagagactgctaaggttgacgctgacagcgtagacgagcttataaagttaattaatttatataagcctcaaatagtaataaacgtcgcgctgccgtatcaggatttgactataatggacgcatgtcttgaaactaaagtggattatttggatactgcaaactatgaaccgcccgatactgccaagtttgaatataaatggcagtgggcttaccgtgaaaagtttgagaaagctggaataacagccattttgggcagcggttttgaccctggggtgaccggtgtgttctgtgcgtatgctcaaaagcatatattcgatgaaataaattatattgatatactcgactgcaatggcggcgaccatgggtatccgtttgcaaccaacttcaatccggagataaatattcgtgaggtttcggcaaacggaagctattggcaggatggcaaatggatagagacaaagcctatggaaataaaacgggagtataattttgacgaagtaggcgttaaagatatgtatctgcttcatcatgaggaacttgaatctttagggcttaatataaaaggtataaaacgtatcaggttttttatgacattcggagagagttatctcacgcatttaaaatgtttggagaacgttggaatgacgtcaatagaaccgataatttatgagggccgtgaaattataccgctgcagtttttaaaagctgtgcttcctgatccggcttcattgggacccaggactgtgggtaaaactaatattggatgtatattcaccgggaaaaaggacggggaggaaaagacatattatctttataacgtttgcgaccatcaggaatgctataaagaagtcggctcccaggcggtgtcatatactactggagttcctgcaatgattggcgctgcaatggttctcagcggaaagtggaaaaagcctggagtttataatgttgaagaaatggatcccgacccatttatggaggatttaaataagtttgggcttccatggaaggaagactactcacctattttagtagattagctaaatataatatattccgggacaaaattgttccggattttttatatataattttagggaaaacaattttattatagtgtaaataattgttacttttcagattaaagtaaataaaaatttttgaaaagtaaaaatgcggcaagtttgattttgcgaacgaaatagatgtatttcataatgtattggagtacagtggaacttttgcagattaattatatatttacaaaaatatagttatgaaacagatttgaaaaaatatatattacctgtctcatcattgtatttattttgtgattttgttcttctattaaaagcttaaaaaatattataaaacagtaatatttcaaacaaaatagctgtatatgaaacttgaaatttatttagtcaaataaaaaagcaaaataactgtaaattatgccgtctttttataatgaaaatttataaaaagagtggtataatttgtatatatcttttcgattggagggttaattttatgaagaaaaagttattttgcgttatactgtcaatcataatgttggcaggatgtattcctgcaatggcagttcaggatggtcctgaattgaattctgaattacagcagagttcagagcagtcaaggcagatggagaaattagacagaggtgcttttggagcaacggcaccgtcaggcggagtttatttgagctggaggctattaggaagcgagcccatggacactgtttttaacatttataaaaacgatcaaaaattggtggattccattaataataccaattttactgatcttgaaggttcagagacggataagtatacaatagcgcctgtaattaacggacaggaaggcgagaaatgtgaacctataactatattggcaggtcatgctgataagggacaggaatccgttccgtatacatattttgatataccgctgaatattccgtcaccagcaagtgattatgagattgtatatgacaacggaaagtcaaacagtcctataggcggagcaaacgacgtgtcggttggagacgttgacggtgacggcgagtatgagataattctgaagtgggatcctaataattcaaaggataattctcagtcaggaaaaacaggcagagtatatttggattgctatgaaatggatggaacccagctttggagaatcgatatgggagttaatatcagagctggagcacactatactcaattccaggtttatgattatgacggagacggaagggctgaattagcggtaaaaacagcgcccggaactatagacggagcaggtaattatgtaacacaggcaggaactacagaggcaataaaaagcgctgataattcggcgtcttatgttaactcaagcggatttatcattgacggacctgaatatctgacaatctttaacggtcagaccggagcggcaatgcagacggttgattatgacccgggaagaggagataccactacttggggaaagaccagtgataagacaaacagagtagacagatttttggcatgcacagcttatcttgacggagtacatccaagtcttgtaactgcccgcggatattatggaaaagctattgtagtggcatatgactgggacggaaagaacttaaataagcgctggagatgtgacagcacggtctcaggttacggcagtcttgcgggacagggtaaccataatgtttccgtagcggatttggacggcgacggctgtgatgagatagtatacggcagcgctgctatagataatgacggaactgtggctcattcaacaggatggggacatggagatgctattcacgtttcagactttaacaatgacggcaagcaggaaattttcggagttttagaagaaaaacctaactggggaaccgggtttagagatgcggcgggaaaagagatatggcattttaaagcgagcggtgacgacggaagaggagtaatggattattttagtcctaaatatggagtgctcgcttgggatgcagcttttggtgtacgtactattggcggcgaattaatcagcaaaacaactttgcatgatggatcatatcctaactttccgatttattgggacggggatttgtaccgtgagcattttaatggagatagaataagcaaatggagtgatgaaagtctttcgtttggtagactctggactatttatactaataacgcggtaaagtttattaacagcacgaagactaatccaaatctgcaggcagatttgtttggtgactggagagaggaaataatactaaggcattctgacaattcagctttgcgtgtgtttgcttctatcagtccgaccgactataagtttacaacatttatgcacgacagccaataccgcagtgctatagcttggcagaataccgcatataatcagcctcctcatcaaagctattacataggatatgacaaagatatttcagaatatgttcagcctaacttatactatgcgccgcttcctgagagtatagtgactgttaaagatagcagcggaaatttgctgtcaggcgccagtgttaaaatagacagtcagattatgacaactgatgaaaatggaatggtatctgcaagactgcttccgggaacccataattatgaggttgaactagataggtatatattgagtaaagggtcgtttgaagtgcctgaaaacagcggagctgcgcttgaagtagttcttgaagctaagcagtatatatacgacagcagtaatgacgaaacaggttcaaaatttgtatatgacggaagcgaaggagcagctttaactttctcaagttcaaaagagtggcagtttacacaagacagcactgatggaggcagaagcttcaaagctgattttgaaacggcatacggcggcaatgctgaactggaatttgcatttggaacaggcggtactaaagacgccggaggagcatggaattggacaggaagagcttatacttatgagattaagctattggattcaacagagaaaacagttttggcaataggtcaggaatattcggaatcaggagcaaatgaggcctattattattcaggaacaggagcaaaaacaaatatttcatcaggaacagtctttggctcgcccaatataaccaagagaagctcttcgaactggaggattaaaatttcccttgatttaacaaatggaacagctaaattgatattgagcgacgattccggtgaaaatggatatattattgaaaatatatccattgattctgcagactttagttctcttgagataggttcgattgcttctagcaatgtaacctggtcgccgaaggtaaaagatgtattgtattgggcggattctgtaactccgccgtcaccgccgccgacacttgacccaacaaaaccaacacctacagctaaaccaacagctgaacccactgctacaccattaccgacagacgctcctataattggacaaagctgggattttgacaatctaaagtcaggggatatttatggaaatagtgatgataataatactatctcaaataataacggaaaatcaataaatatagatttcggaacatcggctgctgacggcgctgtgccgcctgcaataacccaaagagctgaaggaaataactatattcagtttactgataaaggcgtcggtcaggacggctggtcatatttgccggaaactgttttagacggagataagataatatttgaagaagatttcatgagcggagacacagctaaggatacaccgctgtttagaatatttgattcaaataatgccaacccggataatacatatactactgctaaagacggcagagtgtttgaagtgatgacagtggaaggcggaacgctgaagttaaatgattatttctctatgggcgcttccgctacaaagcctaaggatactcagatttccggatttagtttcagtcctaataaatggtatagcttaaaacttgaatatacaaagagcgataataaagtaaaggtttatactaaagaagctgacagttctgactatacattgagaggaacggttacgcttggctccggtactaaaaaaattgatgaggttccgcagcttttgcctacaaaagttcaatgttctactcgtggttcttctgcaaacagcttaggtattgataatattaccgtgggtgtccaggggggctcggaggttcctgaagtaactcctacagttcagccggcttctgaatttatgtatactttgaattcgatagcggaagctgaaaatggcataaatataaatctaacaaaaaataaagaaggaatcggatcgaacgtaataattgcagcggcgtatgacagggagacaggggctttgaccgctgttgaaaccagtgatataacaatgaatgttggagattcatccaatatattcgtaccattagccgtatcggaaaccaatgaaattaaggtgtttgtttggaactcaacagacggaatagaacctctttcaaaaagtataagtaaatagttaattcccccgggaactgatatacctctctataagtgtctaacttttggcggataatatcaaatttttcccgggggagtgtttttaatgtatcaattaataaaaactttattttagtttataaatattttataattgctttatttgttttcaatttttgggatttatactcttaacatagattgagacatatgttaaatctaaactcaaaactcaaaacaaaaaatctatcaattatgaaagcgaggcaaatgtatgaaaaagacaagaaacagaatcatccgagctgcggcgtgcataggcgttggagttgcagtcctgggaatggcggtatttgctaattttgacaacgccaatggatatggcgtggttaaagaagctgcaaaaaatacctttttctcttctgacaatgttactgcggatataaacgtttcagctgatttggaaggctcaaatctttttggcggaaaagcgctgataaaaaaagatgccggcggggatgtaaaaatgcagacttcgtcacaatcgtatgatgaaaccggaacactggtggatactgacaatttaatgactattcaagacggttacagattatcatcatacacttataataccgatgaaggtccggagactcacaaaacaaagtacaaaatgagtgacagggatatttctgaagagctgtttacgaatacagaagttttggataaacagattggcttccttgaaactttggcggatactttaataggcgacataaaaaataatatagttctcactgattcaaatgacggaaacagaacttatacaattaacatgacaggggaacagcttcctaaatatatgacagcagcattttcattatttaacgcgtcattgagagcaaactatgaaaattctaatgaaatcttcgatgaagaaaacgctaacattcagacaatgtctgaaatgttcctgaacaaaaatgagccgtatgtgaatataataagcggcagcgtatccattgataatgccggaagaatctccgcatttaacggtaaagttgttttgacaggttatgacaactcaggagctcagaagaatttaaatatgagtttagacgctgcatttaaagattatggaacaaccagcattgagagagtgaacgctgatgaatatgaggatatgtctgtcagcgtaacaactaagtatgcagtagaagaagacggttcaggtcatatgactataacagaaagtgatgaagatgttgaaggcggtataaacggttcagtcaatcttcaagcaaataatgaagacggtactttttcgacttatactgtaagcagcgatggaaaacttagagatgaaaacggaaatgttgttaccgtagtgaataatgaaagctcagaagcggttaatgacgcggcataagaaaaacggtgcgtgtataacaatttaagaatcagaaaggcagttaaatatggataataagaataatgctgttctatcagttcatagcttaaaaaaattattcagaaacggccgcggagtaaacaatatcaccctcaatgttaatgagggtgatattgtaggtttgctgggtcctaacggttcgggaaaaacaacggctatgaaatcaataataggcatgaataggattgacgaaggtgaaatacagatttttggatatgatatagatgatgatttcgagtctgcaatggagagtgttggatgcttgatagaaactccggcactttatgacagaatgagcgcttatcaaaatttaaaagctgcggctaggttttataaatatcctgataaaagaacagaaacagaggctataaataatgctttgtcattagtaggtcttgataaatattctaaggataaagccggaagcttctcgctgggaatgcgtcaaaggctggggatagctttggctcttttgccgcgtcctagacttgtaatacttgatgaacctactaacgggctggatattgaaggcgttgttcatatccgcagcgttattaaagaaatgtctgaaaaaaataaaacaacctttttaatatccggacatgttgcgtcagaacttgaaaaactatgcgataaggtagcagttatatatgacggcagactgctggctatgaacagtatggaggaagttcttgaaaatttcccttcgttggaagattattttctttctatagtaggcgacgctaaggatactgaaaggaggcgtgtaatatgagtggattgctggctaattacaggaatgaatgcgctaagctgatgagcagtaaaaaatacatagtttttataataatagaaattttgatttgcgctgtagcggtattttcaaaactgatagtgacgtctatttcaaagggaacttggaccatgaataatataagttctcctatttcgctcatgacgttgttcgttcaggctatagttccatttattataatgcttgcttcgtgcgacttgtttgcgggagaatttcaggacaagactatacgcgcggtgtttatgcgccccacagcaagatataaggtttttgtaggaaaggttttggcagttattactatagctgctgtaaatatggcggtagttctgatatcttcaagcatatttgatattattgtgtcaggaagcgtagtgaatttaggatatgcggtatgggcatatattttggatatggtgcctttggcagttttggcgcttatgacaattatgataaatcagcttgtaaaaaactcgacatttgcgatgtttttggctataatagtatatataggcctgaatgtgctgggaatttatttttcaaatctaagcggattagtatttaccggatatatgcagtggcataaactgtggttaggcgccggactgccaatatcagcattattcagcaaaattttgcttatgctgggttacggattaacctttactgctgtaggttattatttgtttaggtttaaggaatgctgataagataaaccgctggattacggaggcggatatatgtcaattaaaaagaaacttatgttatcatcgattgtaatgctggtattgccgattttcattatggtgctcatatcagcatttattttcgtacttgttttaagttatgtgccgagtatatctattcaaattaacggtattactcccagccttaataatcctatgatttttagattactgctggtttggctttttatattgattgtagttgttcttgcttgctgtataggagtaacggcatatctgtcaaaaagtataatagcgccgcttaaaaaaatgtccggcgctatggaacatttgacggaaggcgacctcagctatgagtttacatgttcaggtgaccgtgaaattaaagaagtctatgattcgattgaaaacttaagagtcaggctgaaaaaatctgtagatgaagaaataaggcgagagacagaacacagaatgcttatagccaacatctcgcatgacttaaaaactcctattacctcaataaaaggatatgttgaggggataaaggatggagtagccgatacgccggaaatgttggagcgttatcttaacacgatacaggctaaggctaatacccttgaggctatggtaaataatctttcggagtattctaagttggatttagacagtgcgccgtacgatatgcaggtttgggatataagaggttttgtgcgttcagtgctggaggaattctcaattgatttatcaggagccggtatggagcttgatattggtgaaaatttaagcggcagtgaagaaatatatgtaaggtttgattgtgaaaaattaaacagggtgctttccaatataataagcaattctataaagtacagaaagcctgatattcccggaaaactaagtgttgagttaacagaaaatgacggttgggtaattttgagtttttcagacaatggaattgggataagtaagcaggaagaaaagaaagtgtttgagacgttttttagagctgacccggcaagaaatttaaacgtttcaggcaatggtctcggtctttctatagcatgcagaataataaaagaacacggcggaaagatatggatgcgttccggaggcgataagaatggagtaactgtttatataagactgaaaaagtatattttggaagattaagacaaaaggattggtttatatgaaaatattaataattgaggatgataaaagtatagctgaacttgagatggattatttgtcagccaacggatttgaatgtgagttggcaaatgatggagaatccgggttgaaaaaggctttggaaaatgattatgaccttgtgataattgacgttatgcttccccggcgcgacgggttttcagtgtgcggtgagcttagaaaggttaaagatgttccggtaatatttttatctgctagaagtgaagatatagacaaaatacgcggacttggactgggcgctgatgattatatagctaaacctttctctccttcagagatggtggctagagttaaaacccatatttcgagatacaagaccctcagaagcggctctgacgctgtgaagccggagataatagaaatcagagggcttaaagtagataaagggtcaagacgggtgttcagtgacggcaaagaagtaataatgaccgtaaaagaatatgatttgcttttatttcttcttgaaaatccaaatatagtttttaacaaagaggtgctttttgaccgcgtttggggtttggaagcattcggagacgcttcaacggttactgttcatatacaaagaataagagacaaaattgagaagaactctgaaaataagtacattgaaaccgtttggggcgcaggatataggttcagagcttagcatattattctgtggatttggaaaatcctttagggcataccctcatacatataccgcacacaactccgcggcctatgttttggtatgcttttttcatatgctggctgcacgccagagcgtcaatgattttttctctcggttccccgggattccacgtttcacctgtgatagccattgcagggcaggcttttacgcaaagcgtacagcttccgcattggcattctaaaatatttgtattaaaatcaaattctgcgcagtcagtcaaaattgttccgagccgaactctgggtccgttgatatttgaaataaacagaccgctcttgccgatatagcctaaacctgcttttacagccgcatatttatgtgaaaatattcctttaagtccattgacggactgagaggcagggacaggaacatacttatatccggctttttgaagtatcagaccggtttttaaagagttattgtcaatcaatgtgtttactgacctgtagtggtggaaatatgtatgcgtgggtttatcgtttatctgctccactactgcgtcagacagcggtattgtatatgatatggcatattttaaattaaaatcgtttgtgccaaaatcatcgttgtctaggcggcagaatcccacttgtccggcgccgttgtttattaaaaaatcaattattttttcttgcatattctctttcataacaatttcctatcttaaatttatagtcttgacttaaagtcctgatacccaaaagttttgataagttccgtatctccgttttgatgtctcagaactatgctgggcaggtttataccgttaaaagtgttatttttaacagtggtgtaaatagccatatcgcaaaaggtgattttatcaccgggttttaaaggttctttaaaggagtagtcaccgataatatcaccggccagacaggttggaccggccaaacggtaagtgtatggatattccccgggattcccggcgtcaataacgttggggcgataaggcatttctaaaacgtccggcatatggcatgctgccgaagtatccaatattgcgatatcaatttcattatttattatatccataacgcttgatgtcaaatatccggcattgagagcaactgcttctccgggttccaaatagacggcgacaccatatttgtcagaaaaataatttatagatttgcacagaagttctatatcataatcttcccttgtgatatgatgacctccgcccatgtttatccatttcatattttttatatactttccgaatttttcatctactttttgaacggtcctccataaaacgtcagaattctgctcgcacatagtgtgaaagtgaagtccgcttattccgtcgaggttgctgtgttcaaagtttcttaaagtgactcccattctggagcctttaaagcatggattatatatgtcagtttcaatttcagaatattcaggatttattcttataccgcattcaattcctgttcctgacacaatatttttatatttattccactgggaaaatgagttgaaaactatgtggtcacagatttttattatttcagaaaaatcttcatcgctgtaagccggagcgtaaatatgagtttctgtgcccggcatttcttcgtggcccagtttagcttcaaacagagaacttgctgtggtaccggcaagatattttcctataagcggatacaatgaatacattgaaaacgctttttgtgcaagcagaatttttgctccggttttgtcggaaacactttttaaaatctctaaattttttataattaaattttcatcaattaaataatatggtgtttttatatcgctttgcttcatttgattacctcattaatttatttctaattaatatatcataaagagcagaatttatcaatatttctatgaaatttgccgatatgaattgttaacaataatattacagacgttgatatattgaattgaaaatggtatactatctaaagtgaattgttctgtaattcaagaggagatgaaaaaaatggcagaacctgtagttaaaaatagaaaagtttcgtattcatatactgaacaagtgcaaatggttacgtctcctgacttaaacggatacggaagattgttcggcggaagactgatggagtggatagatgtcgtggccggaattgttgccaggagacacagcggatgcaaggtaaccacggctatggttgacactctctgtttcagagcgccggcatatccgaacgataccttggtgcttgcgggaaaagtaacccatgtgggacggacttcaatggaagtgtgcgtccgcactatggtagaagatttgaacggcatgaagagaaccattaataaagcttatttggttttggtagcccttgacgatgatgacagaccgactgaagttcctgggcttatacttgaaactgacgaggataaaatggagtgggaactcgctaaaaaacgcggtgagctcaggagcgaaaggcgcagaataaacgctaactagttaaaataatatatctgtttaacaggtggtgaataagggatgggacggcaaattgcacggcggacagcgaaaccggaactttcgcatatgaatattttttgtgcgtttcttgttatatttattcattgtgcttcagtcataattggtgagactaccagtttggatactgcttttaatgctgtctttataccttggagattcagcacttttgttgtgcctgcatttatttttctgagcggtgtgaagctgttcttgacagataaaaaaattgattatgttaaattctacaagggccgtataacaagagtgattttaccttatcttttgtgggtgtttatattttatattttttttgtaaaccaccattattttgaattttcgtgggacgggctgtttcatgcgtggtggcgcggagatttagtgggtcacttttattttgttattataatagttcagttttatatattaatgcctttatgggtctatgcgttaaggcgtgtcactccggctgtcgggatagctttttcggttttaatctcggtagttttgggatataatttatcgaatatactatacataatcttgccgaatcatgtgttccagttctctgatgttatttttacaaaatatttgttatactgggtatgcggatgctatgttggtatgaattatcaaaagtttaaagagattatactgaaccgaaaaattttaattacagcactattcttattttcaggattcctggatatttatttggcgtatgctacatacaatatggctgtaccgtggatggaagaagtacatattctctattgtacatcggcaatactttttttctttatgttcttctgctggatatgtgacaaaagaaaacagcttacccggttcacaagggctttggattcccagtgttataacatttatctatcgcattgcctgataattttatggctgaatgattatcttttgacagaaataaaaatgagcaatgtagtgcaaagattttggactatagccctatcagcctatcttggttcatttattttctggatgctttggtgggtaataaagacgggagttaaaactatattcaggtttatcaaaacaaggttagccggaataaaaagtgcggtgtaaaaacttgtcaattatgcggcgatgtgttataatgaacaatatcatcatgaaaggtgaatggtgcaaaaaatgaaatttggcaaaaatataaaaaatatgattgtttttggtgcggtagttataatgctggcaagcgttttaagcagctgcggaaacggtgatacatcttcaaaaaagagtgtggattcatcaggaacttcgcaaaacagcagttcaggtactttggtaggggacaagtatataaactatatcaattcatttactgacgaggtaggcgcctttgtgaacggagatatggataaggttctaaacggtgtaggaagcttatcacaggataactacgcagagtggaaagctttatatgaaaagggtcttgatagcactgaacactggtacagtgaagtgggagcggcagctatgctttgcggtgaagatcagaaagaagctcatgatgaactgacaaaaactgtcggaacgatatataagatttttgaaggtcttaaatccagagtggaagcagcggataacggcgatttttcacagcttacgtctatggctgaagaatacaaggaagctgataaaatagctcatacaatttgggaacatgctgtggacgctgttaaatgattaatgtagtaaatactggaatagctgaaaagtttgtaaaatactcttgatttttattgaaaatagggtataatagagctacagattttgaaaggagttaatatttatggcaaatcaggttaccaaagatactattattatagatgttttaaagatggatccgggaacagcggatttctttattcaaattggaatgcactgtttgggctgtccttcttcaagcggtgagagcattgagcaggcatgcatggttcacggtgtagattgtgacgagttggttggcaagattaacagttacttggcttcaaaatagcgtgaatttaaatattttttaagaaatttgtaaaaagatattgacaaacaggccgtgattagatataataatcgctgtctgtttgtgttttctttagggatttaggtgatataaatggatattaatatagctccgattaagaattatgaaggtaaagagatacctattaactgcgaagtaaatattgcgggaatgcccggtgatgattttaagatactggagcccgtaaaaattttgggagtaattcgtaattttggaggaacttttgaactcgaagcaaaaggcacggcaaagcttcagtttgtctgtgacagatgtgcggaagagttctcaagcgagatgaattttaatatatctgaaagattcaaagaaattgaaagattttccgactctgaggatgaagaaaatcaaaatccggatataaattacttatcaggagatataatttcgctggacgagtatgtttattcaaatatggttcttaacgttccgataaagcatttgtgccaagaggactgcaaaggattatgtttcaagtgcggaactaatcttaataacggcagctgttcatgcgatacaagggaagttgaccctaggtttgatatactcaacagtttggacatagattagttaataagtagaaaatgcagcgtttctttaagtaacactgtttcgaggatttcctcataaatatttgatgaattggaaagaggtgtggcataaatggcagttccaaagagaaagacgtcaaaggctagaagagataagagaagagcaaactggaagctttctgtaccaggtatggtagagtgtcctcagtgtggagcactcaagctgtctcatagggtttgtaaggcctgcgggacttataagggaaaagaagttatttcggttggcgaataattttggcttgattaacaccgtgtgctcggcgcacggtgttttttgttgaaaataaattcttgatgaatggaaattattgtggtatactacagtatagaattaggctttgaggaggcagaatatgaaacctgttgtagctgttgtaggacgtccgaatgtgggaaagtccactttttttaataaggtcgctggaagacgtatttcaataattgaggatacgcccggtgttaccagagatagaatatatgttgacgctgaatggtgcggcagggatttcacccttatagatacgggcggaattgaacccggaagcgatgacgtaatactggagcagatgaaggctcaggctgagctcgctatagatatggctgatgttattgtgtttatggtaaacgtcaaagacggcatgaccgctgctgataaagacgttgcggctatgcttcagaaatgcggcacgcctgttatattggtggctaataaggtggacaaccccggtgatccgccaatggaaatatacgagttttataaccttggtattggagacccctggccggtttcatccgttcatggtttgggcgtcggagatttgttagatgagatagttcagtattttccggaggataacgagaacagcgacgagtcggatgttatacatgttgctattgtcggtaaaccaaatgccggaaaatcctctttggtgaatcagatactcggtgagaacagagttatagtaagcgatatagccggaaccaccagagacgcaatagacacgttttatgaacgggacggaaaaaaatatatgttgattgataccgccggtatgagaaaacgcggccgtataaatgagaatgttgaaagatacagtgtgagccgttcccttaatgcaatcgacagagcggatgtttgtcttataatgatagacgcagcggaagggataaccgaacaggacactaagattgctggatatgttcatgaagccggaaaggcaagtatagttgttgtaaataaatgggatttggttgagaaagaaacaaataccatgaaaaactttaagataaaagtaaaagaaggctttaattttatgatgtacgccccgtctgtgtttatttcggcagttacaggtcagagggtggacagcctttttgagatgatggataaagttgtcgagcagaatacaaaacgtatatcaacaggtattttaaatgatgttttgggcgaggctgtctcagcggttcagccgccgagcgataagggaaagaggctgaaaatatactatacgacacaggcagatataaaaccgcccacgtttgtattatttgtcaatgacgcaaagcttgcccactattcttatgtcagatatatagaaaaccagttcagagcgaggttcggatttgagggcactccaatcaagtttataataagagaaaaaggcaagaagaaatagaaaactaaggagagagtaaaatggaaatattgtggctgatagctattggagtaattgcttatcttataggaagcgtaagcagcgctataatagtcggacgtatttttggcggtgaagatataagaacaaaaggcagcggaaacgcaggggctactaatgcgctgagaacatatggcaaaaaggcggcggcaattgtgacggtctgcgactgtctaaaggcagttgccgcgattctgattgcaatgttaatttcaaatatgactgggattgacagtgtatatggaaacacaccggtttatgttgcaggcgtttgcgctgttttggggcataacttccctatatattttggatttcacggcggcaagggtattttggtttctatggttgcgatgctgtttgctaattggtggataggattaatagttttggttttcgctttaatagttatggcggtttccaaatatgtgtctctcggaagtattttaggttcagttctgttagttattttgtctttaattttcggaggcggagatattgcgtatatactattctgtgtgattttggctgtgcttgctgtttttatgcacagggcaaatataaagcgcttgataaacggtactgaaaataagctgggaagcaagaaaggatgagattatggcgaatatcagtgtgataggaagcggcggctggggaagcgccgttgctataatgttggcgaaaaatggtcacagagttaccttgtggtcttacttaaaagaggaaagcgaagatttaaaaaagtatagagaaaataagccgtttttgccgggagttaaattcccggacggcgtaaggtttacttctgaattatcagagtgctgtcaagatgcggatgttattgtaacggcaactccgtcgcatgctataagaacaaccgcaaagaatatgtcgggatttataaaagacgggcagataattgttaatatttccaaaggtttggaagaggggacgcactcaacactttcaaaagtaataaaagaagaaattccaaactgtgaagttgttgttatgtcgggaccgagccacgctgaggaagtttcaagagatatacctactacaaatgttgtggcttgtgaaaattgcgaaaccgcaaaaattatacaggatatttttatgaatccaaactttagggtttataccaacacggatgtgctgggcgtagagcttggcggctctttgaagaatgtaatagctttatgtgccggtattgttgatggtatggggcttggagacaacacgaaagccgctttaatgaccaggggtttggttgaaatgtctcgtttgggtgtggctctcggagcaaagcacgagacttttaatggattatcaggtgtgggcgatttgatagtgacttgcacaagtatgcattccaggaaccgacgcgccggaattctgataggtcagggaaaaactcccgagcaggcgcgcgacgaggtaaaaatggtagttgagggaataaagacttgccgtgcggccaaagagcttgctgattcagccggtgttgagatgccgatagttaacgaggcttataaggtactgtttgagggaatggctcccggcatggcgctcaaaaatcttatgggacgtgataagaagcatgagacagaaatggactttttaggtactgtaaaataaaagttttataataaagtataaaaaaccttttgcgttatggcagcagccagtgcaaaaggttttttattattcaataattttatcttttagtttctgagagagtatccggtttaaatctttattgatttcaagagtaaataattaatatataagttttatcacccgtattaaacagatataaataattttatttgatataaaataataagttcaatgttaggtaagcaaatgtgaggtgactttatcacctttaattataagcttaaataagataataaggttttagcgcccgggtctggcgggcgcaactgggctaggcaacaatcgaataaaatgtatagatattaaatgggtttaagttatcaagaaaatattttccgatttttacactacgttaaaataatattatcattaatataatttcacaacattacggtcttgttgttttatattgttactttgtatagcctagcccagttgcgcccgccagacccgggcgctaaaaccttttcgtttgttatttgcgatttaaattgtttatagggattgctgaatcaacagctgaaaagatatacataatagtctataaagagtgctgaattgataactttataaaaatgtatatagtagtttaaaaagagtgttgaatcgacaggtgtaaaaattacatttaatagttaaaaagagtgttgaattgataggtgtaaaaattacatttaatagttaaaagtgcgttgaatcgacaactgtataaaaatatacgtagtagtttaaaaagagtgctgtatcgacaagtgcaaatttatacttaatagtttagaaaggttgctgaatccatatttataatagttatttttttaaaaagaggctgaaattgaaataaaaatatttatattgatttattgcggattctgaaggtttgttaatataaggtttttacttatttgctattttcgtacttataagagaattttatattggttatttttatcctaaaagcagagcgttaaagtttttttatatacgtctgattatttttataatgttaatccataatatccatttatctggtaagttagtttaattggttaataatgtagttttaaaatgttattatttactttaattcactattacgttatatttttttattacttttataattattaatattttatattgaatgttaacgcgctaatctagttttttggcaagaaaatttatttagtaaatttcccgctaatttattattatgaattttaaagtcttaataaaagttaaaattttttatctcatggattagataaaagcatgctgtggttataaggtcaacattatctgtttaaagctataaattcaattattaaactattttatcacatgcttataaaatataattatttggaaataatatgataagtatttttggatatatggaaaagattaaaatgtaaagttataaaatgggaattgctaaatcttaaccatagagatgtatgtaaaatacaaaacagtgtgtcttaaaggctaataaaaattttttataccgagccatatttaaaacgcttgtggtaattatagctaaaaagaggaaaacagatttgttgacttttacctgttgacatatgtgtgttaaggtagtagaataacattgtaagaaacttgtatactagaatgcaaagtatacaactatactaaatttgtaaggggagaaagattatgaaaaagttaaaacgcttgacggctttaatgctaagttttgctttaattgcggcagcggctttcgtcgtatcgggctgctccggctccgcattttcaggcaagcggatagttcgaatttcacattcacagtcagagacgcatcctgatcatattgggcttctcgcatttgaagaatatgttgagtcaagacttggcgacaagtacgatattcaaatattccccaatgagattttgggagcgtcggttaaggctattgaactggttcagacaggagctattgattactgcgtggccagcacaggaaatcttgaaacctttgacgatatttaccaaatattcagtatcccatatctcttcaacagtgaagagcattatcacagcataatggaaaacgatgagatgatgaaaggaatttttacatctactgacgcgtcaggatttgaagcggtgacatggcttgacgcaggagtcagaaacttttacgccactacccctataagaacgccggatgatttaaagggtaaaaagataagagttcagcaaagcccgacaaacgtcaagatgatggaagcctttggcgcctcggcaactcctatgtcatttggggaagtatatacggcaatacagcagaacgttataaacggagcagaaaataatgagcttgcgcttaccaataataagcacggtgaggtggcaaagtattacagctataacgaacatcagatggtgccggatatgcttatcgcaaacctaaagtttttgcaggatttgccgcctgaggaaagacaggtatttgatgaagcggctgaggtgtgcaacagagctgagcgtgagagctggagtgacgctgtggaagaagcaaaagatattgccaaaggaatgggcgttgaatttttagaagtagatgttactgctttcagagaaaaagttcttcctctgcataaagaaatattaaatgaaaatccaaagcttcgtcctatttatgatgctatacaaaaggaggcgggcagtaatgattaaacttaaaaatattctgactaagattcttgaggttatatgcgtcataatgtttgcgtttataacaattgtaggaacatatcaaatcgtaacaagatatgtatttaatgcacccagtaccgtttcagaagagcttttaacgtattcatttacttggctggcgctgctggccgccgctctcgtattcgcaaaaagagaacatatgagaatgggttttttagctgataagttttcgggaaacgccctaagatggatatatattttttcagagcttttagttatattgtttgcggcgcttatcatgatttacggcggaacaagcataacaaagcttacaatgactcaggttacagcctcgcttggaataccaatgtccatgatttatgttatagttccgatatgcggaatttttgtaatattgtttggagtaataaatatatatgaacttctccgcgctaaggaggttaaacctctgagtgcaaaaaaggagacagttatcagcaataaaagcgctgtcgtacaaaaagcaatagtaaagggggataagtaattatgtcaatagcagcaatttcaggtttaatagtgggcgtagttttaattgtcctgctgcttgcaggagtaccgatttcaatctctattggtatttcatctatacttgctatccttccgataatggatttcaacgcggcagttttgacaggcgcgcaaagattgttttcgggaatatcagtatttaccttgatagcgataccgttctttattctagcgggaaatataatgaataagggcggaattgcgacgagactgataaattttgcattactgcttaccggcagggttccgggagctctggcacatacaaacgcagtagctaatatgatgtttggagcgatttcgggttcgggcgtcgcttctgcttcggcaatgggttcaattataggtcctattgaggaagaggaaggctatgatgttgagtattcggcaacggcaaatattgcaacagcgccgaccggactgctaattcctccgagtaacgtattgattacttattccttggtaagcggaggaacttctgttgcggccttgtttatgggcggatatatcccgggcattttgtgggggcttgcttgtatggtggtggctttctttattgccagaaaaaagggatacagaagcaatcgccgcgttaaagctaaagacgctgtgaagatagttatggacgctataccaagtttgcttttgatagttatcgttataggcggaatcattgccggtatatttacggctaccgaaggttctgtagttgcggtggtgtatagtttgattctgtcgttttgttacagaacaataaagataaaagatttatataaaatatttaaagacagtgcagagacaaccggtatcattgtttttctgataggcgtttcaagtataatggcgtggattttagcgtttacaggtattcctgcggcgatttcaaacgctttgcttggaataagcaataataaaattgttattttgcttataatcaacgttatacttttagttgtcggaacatttatggatattacaccggcaatattgatatttacgccaatattcctaccggtagttaccagtgatttgataggaatgacggcaatacagttcggaattatgctggtatttaacttatgtataggaacaataacacctcctgtaggtaacattttgtttgttggagttagggtggcaaaaacatctattgagagggttataaaaccgctcctcccatattatggggttattatattggtacttctgcttgttacctttgttccggcaatctcaatgtttttaccgagacttatgggattttaaatttatataaatttaactttcgcattgtttgccccgtgcattgcgaataaaataaattgatggggcagataggagaataaaatatgaaaatgacactgagatggtttggcgagggcaatgacagcgttgaactctggaagataagacagattcccggagtaacaggggtaataacaactttatataatattcctgttggggaagcctggacgtatgaagatataatggaaatgaaaaataaagttgaagcttcggggttaaaagtagaaggaatagagagcgttaatattcatgactcaataaaaatcggtctgccggacagagacaaatatattgagaactatataacaacgcttgagaatttggcaaaggctgatataaagctggtgtgttataattttatgcctgtctttgactggacccgttcagagcttgcaaaaaagcgtgacgatggttcgactgtactttcatatgaccaggataaaatagatgaaataaacccggatgagatgtttaagcagatagattcgaacagtcagggatttgtaatgccgggctgggagcctgagagactggctcatgtaaaagagctgtttgaagcttataaggatgtaggagaacaaaatctgtttgacaatcttgtatattttctaaaaaaaatacagccggtttgcgaaaaacatgatataatgatggcaatacatccagacgaccctgcatggccggtgtttaatcttccgaggataataaataataaggaaaatattttaaaacttttaaatgcggtagacagtaagtttaacggtttaactttatgtacagggtctctaggttctaaccctgataatgatatatgtgacattatcaaggcgacaaagggcagagtgcattttgctcatataagaaacctgcgtcatcattctccggggaaatttgaggaggcggcacatctttcgagagatggttctatggatatgtataaaataatgaagacgctatatgaaaccggttttgacggtcctatacgccctgaccatggaagaatgatttggggtgaggttgcgatgccgggatatggtctatacgacagagctttgggagcgacatacctgaacggacttctggaagctattgaaaaagagtagggggaaacactatgaaattgtcaagacgctcaattgttcagaataaaagtgagtgggaaaagctgggttatactttgcctgagtataatatagacgaaatgattaagaaaacttcagaaaatccaatatgggttcattttggagccggaaatattttcagagcatttccggcggcggtttgccagaaacttttaaacaagggcataatggacagaggtataattgtagctgaaggttatgattatgagattatagataagagttttaaagattttgataatctgactatttctgtaacgcttaacacagacggaactgtttcaaaagaagttatagccagcgtggcggaggctttaacttttgattttgataacgagactgatacggagcggcttaaagaaatcttttcttcaaagagtttggaaatggcgtcgttcactataacagaaaagggttataatttaaaagacactaagggcgaattttatgacggagtaaaagccgatttcgaaaaaggacctgaaaacgctaagacgtatatgggccgcctggccgcacttctttatcatagatataagaatggggcaagaccgataaccctggtgagtatggataactgttcccataatggaataaaacttaaagaatcagtttatgagtttgctaagagttgggttaacaatcttttagcagacggcgaatttttgccgtatatacaatatagtgtttcatatccatgcagcatgatagataaaataacgccaagaccgtctgatgaggttttaaagattttagaagctgacggaatagaaaatgccgcgcctgttgaaactaaaaagcatacttttgtcgctccgtttgtaaatgctgagaagtatcagtatttggttattgaagacagctttgcagggggaaagcctcctcttaatgaaggcggaataatttatacaagtgctgagacagttgataaagctgaaaaaatgaaagtttgcacatgtcttaatcctcttcatacttgtcttgcaatatacggctgtcttttaggttataataaaattagtgacgagatgaaagacgataatcttgttaaactgataaaaaagataggatatgatgaaggactgccggtagtagttgacccgggtataatttcacctaaagagtttattgacgagacaataaatgaaaggcttccgaacccctttattcctgacgcgccgcaaagaatagcttgcgatacttcacaaaaattgccgataagatttggggaaactataaaggcgtatgaaaagcttgataaaataaaagagcttaaatttatcccattggtattggccggatggtgcagatatttaatgggtatagacgacagcggcaatgtttttgagccaagcccggaccctatgcttgattatgccggaggaattgtgaaagacattgagtttggctgtactgacttagacagtattcataataaaatagaaaagcttttaaaagataaaaagattttcggagtagatttatatgaggtgggattaggtcagctggtagaaaagtatttttcggaattaaacgccgggcccggtgctgtaaaaaatactctgattaaatatttaggataagattaagccggaagtttttcttccggcttatatatatgtaattatcctattaaaaagttttcatttattgacataaaaatttttatgtgttagaattgctatggaaatttattaataaataggcgttttgtctggaggtatcactaatgactgtcacgccaaagaaaaatgaaaaagaaacaaacagagaatacgcattgcgtgttctcgaggaaaatataatctctttggaacttgcaccgggggataaaatcagtgagacagaaatagccaaggaactgaatttaagccgtactccaatcagggaagcttttatagaattggaaggggttaatattttagaaataagacctcagatagggacgtttatttctcttattgaccttgatttggttgaggaggctcgatttctcagattaatactggaaaaagaaatttcgagaatattgtgtgaaatcgaagattcttttatgttgatgccaatggaggaacagctttttaaacagaggctttgtttggaacacaataaaagacgtgagttttatggtcttgataatgaatttcacaaaacgcttgcggctatagcaaataggagcagaagttatgagctgatacataatattcaaatacattttgacaggattagaaaattgaatttaaaacgtgagagatgtcaggaaatttatcagcagcataaaagtatcgcagatgcaataaaagagcacgacgctgaaaaggcggcaaatataataacaaatcatttgtcgaattatgaaaccgatcttgaaaaacttaaaaagactcatcctgagtatataaaagaagattagtaatataaatagatatattaatttgtattagttttgaaaaaacagaatttatgatatgcactccaaaagtcagatgcttttggggtgcatattatattgcaggattattatgataatataattgccagacttatttataaactaacgtataaaacgtttttaataggacacgtcaaatttataagagatgtatgaatatcatcatacaaatagtatatttaaaatagagtaatcttttataatgttagtttggaacaaaatatttgtaattaatagtttcattatttgtgagggtatatgattattttgatgacaaaactacgttttataaaaaacgtgtttcattgttaatagttggtttacataatcgtagagtaatttttaatagtattttaaataaaacttttgacaatctgattcataataaaaatattccaattaattataaattattattgcaaatgaattttatttgttatataatattcaggcaggatagatataaagtaaattaagtaaatactggaggtctttaaaatggcaaaagaaaaagtggttctggcgtattccggcggacttgacacttctatcatcattccgtggcttaaggagaattatgattatgatgttatagccgtatgcggtgatgttggtcagggtaaggaaactgacggtcttgaggaaagagcaaaaaaagcgggcgcttcaaagctctatatcgaggatttgcgcgatgagtacgtttcagattttatttttccgactttgaaagctggtgcaatatacgagggtaagtaccttttgggtacgtctcacgcacgtccgattattgccagaagactggttgaaatagcgaaagaagaaggcgccgttgctatttgtcacggtgcaaccggcaagggcaatgaccaggttcgttttgagctgacaataaaagctttggctcctgagctaaaaattattgctccttggagaatatgggatattaagtcgcgtgaagacgctgtggattatgctgaagcgcataatatagatgttcctgttacaaagaaagatttatattcaagagacagaaatatttggcacatcagccatgagggtatggatcttgaggatcccgcaaacgagcctcagcttgacagtcttttaaaactgggcgtatcgcctgaaaaagctcctgataagccaacctacgtaactataggatttgaacagggcgttcctgtttctgttgacggtaaaaagatggatccccgcccattggttgaaaaacttaatgaacttggcggaaaaaatggtataggtattgcggatattgttgaagacagacttgtcggaatgaaatccagaggagtatacgagactccgggcggaacaattctttatgccgctattcaggaattggaatttttgtgtttggacagggatactcaggcatttaaacgtcaggctgcaattaaatttgcagagctggtatatgacggaaaatggtatacacctttgagagaagctctctcagctatggttgattcaatggaagaaaccgttaccggtgaagttaaattgaaactatataagggctgtgttacgcctgccggaaccaaatctccatattcactgtataatgaggatattgcaagtttcggagacagtcatgagctttacagccataaggacagcgaaggatttataaacctctttggactgccgctaaaggtcagagctatgatgaataagaaatttaagaaataaggttaaaataatttgattactataaactgaagtacaggagaaagattatggcaaaattatggggcggacgtttttcaaaatctacagacacattggttgacgattttaattcatcaatacgttttgatgctagaatgtatgctcaggatattaaagggagtcaggctcatgcagaaatgctgggtcgccaaggcataattcccgaggctgacgccgagttgattgttaagacgcttgatgagataaaagcggatattgaaaataataaggttgagtttgaaatagatgccgaagatatacatatgaatattgaaacgatcttgatttccagaataggcgatgtgggaaaacgtcttcataccggaagaagcagaaatgatcaggtcgcattggatatacgtatgtatttgcgtgatgaaattgatgaaatacttagtgatatagaagacttgaagtcggttatacttaatatttcagagaagcaccttgaaacagtaatgccgggttacacccatctgcaaaaggctcagcctataacatttgctcatcatcttatggcttattatgaaatgctgagaagagacagcgagcgtttaacagattgcagaaagaggttaaacgttatgcctttgggaagcggtgctttagccggaacaacatatgacctggacagggattttgtagcagagaagttgggatttgattcagttacacaaaacagcttagacggagtgtcggacagggattttgtgttagagttagcttttgatttgtcgaccgttatgatgcatctcagcagattgtcagaagagattattctatggagttcgcacgaatttaaatttattgaactggatgacgcttacagcacaggctccagtattatgcctcagaagaaaaatcctgatgtggctgaacttgtgaggggaaaaaccggcagagtatatggcgatatgattggattatttactgtcatgaaaggcatacctcttgcgtataataaggacatgcaggaagataaagaacagatttttgacgcggttgacacaataaaaatgtgcttgccggtattttcaaaaatgcttgcaactatgactgttaataaagatgctatgctgaccggtgcaaaaggcggattcacaaatgcgactgatgttgctgattatttggttaagcatggtctgccgtttagggatgcgcatgctgttgttggcagaatggtggcttattgcattgaaaaggataaagttatagactcgcttaccatagaagagtttaaaagtttttcagctttgtttgatgatgatatatatgaagaaatatccctaacagcctgtgtgaatcagagaaaactgacgggcgggcccgctgttgaaactgtgagagcggttatagaaaaatataaaaataattaaaatatagcagttaactgcaggaagaggagaaaacaatgaaaattttcgttgatacagccaatgttgattacataagagaagtaaatgatatgggcgtaatttgtggtgttactacaaatccgtctcttatagcaaaagaagggaaaaattttattgatgttgtaaaagagattacaaccatagttgacggtcctataagcgctgaggttataagccttgatacagaaggaatggtcaaagaagctgaagagctcgttaagacaattaacaataaaaatttagttataaaaattcctatgactccggcaggtttgggcgcggttaaacaacttactgcaaagggaataaagacaaatgtaactttaattttctcggctgcacaggctcttcttgcagcaagagcgggagccacatatgttagtccgttcctcggcagacttgatgatgtgggacagacaggaatgactttgattgaggaaattgttgaaatatttgatatccatgcaattgatacagagattattgccgcaagcatcagaacacctattcatgcaattgaagcggcaagatgcggagcgcacattgctacaataccgtatccggtaataatgcagatgactaaacatcctttgacagatataggaatagacagattcttaaaagactgggagacagttcctaaagattaataatatttaaaggtgtttatcaaaacggcgctttcatttaatggaagcgctgttttgtgttaaataggtgtaaaagtgaaatgacataaaacgtcatatataatcaaaatgggaataaatatgcaaaatatccaaagaagtgataaataataggttaagtatttgtaaaaagttaagggtaaaaaaggattgacaagaagggtaagaatatgataagataataaagctttcggctgaggcaagaaaagctgaaagatagaatactgtgagagtaaaaaaggaaccggagaaggcaaaaaagtccggctgaaacttaagggacaaaaaagaacagaaaaaaataaaaaaagttcaaaaaaagtcttgacaagtaaaaacaaacatggtatactaataaagttgctgcggtgcagcgatgaagttttctgacaaagagatttgtttgagagctaagcagatgtttgaaaaataaatagtgaaaaagcggtaataaagatacatttagatgtacttattacgacaattgcacaaggtaagaaactcgcaagagtggagactttgtcaattccaaaaaagttttagcgaactttacaagcagagagatctgcaaacgttagtgattgaaaagagctaacaaacaatcgagtatattggaaggcgaaagcctggatatataacaataataatcgagagtttgatcctggctcaggacgaacgctggcggcgtgcctaacacatgcaagtcgagcgagaaatttttaacggattccttcggggagaagataaggatggaaagcggcggacgggtgagtaacgcgtgagtaacctgcctttaggagggggacaacattccgaaagggatgctaataccgcataaaattattgtatcgcatggtatgataatcaaagatttatcgcctaaagatggactcgcgtccgattagctagttggtggggtaaaagcctaccaaggcgacgatcggtagccgaactgagaggttgatcggccacattgggactgagacacggcccagactcctacgggaggcagcagtgggggatattgcgcaatgggggaaaccctgacgcagcaacgccgcgtgaaggaagaaggccttcgggttgtaaacttctttaagtgtggaagataatgacggtacacacagaataagccacggctaactacgtgccagcagccgcggtaatacgtaggtggcaagcgttgtccggatttactgggtgtaaagggcgtgtaggcgggtagacaagtcagatgtgaaataccggggctcaactccggggctgcatttgaaactgtatatcttgagtgtcggagaggaaagcggaattcctagtgtagcggtgaaatgcgtagatattaggaggaacaccagtggcgaaggcggctttctggacgataactgacgctgaggcgcgaaagcgtggggagcaaacaggattagataccctggtagtccacgccgtaaacgatggatactaggtgtaggaggtatcgaccccttctgtgccgcagttaacacaataagtatcccacctggggagtacggtcgcaagattgaaactcaaaggaattgacgggggcccgcacaagcagtggagtatgtggtttaattcgaagcaacgcgaagaaccttaccaggacttgacatcccacgcatagcctagagataggtgaagtcctacgggacgtggagacaggtggtgcatggttgtcgtcagctcgtgtcgtgagatgttgggttaagtcccgcaacgagcgcaacccttactgtcagttaccatcattaagttggggactctggcaggactgccggtgacaaatcggaggaaggtggggacgacgtcaaatcatcatgccccttatgtcctgggctacacacgtactacaatggctgtaaacagagtgaagcaaagcagtgatgtggagcaaaacacaaaaagcagtctcagttcagattgtaggctgaaactcgcctatatgaagtcggaattgctagtaatcgcagatcagcatgctgcggtgaatacgttcccgggccttgtacacaccgcccgtcacaccatgagagtcgataacacccgaagcctgtagcttaaccttagggagagcgcagtcgaaggtgggattgataattagggtgaagtcgtaacaaggtagccgtatcggaaggtgcggctggatcacctcctttctaaggagaccccttggttctgagaagagtaacggaagcggagagcggaagtaagagagtaaggcattgagcctgaaaattatggaagaaggaagcggaaggaagtaacggaagttagccaagaaatcctaaggtcgatgattgaggaaactcaatctcaaaagactttttcactatttgtttttcaaccatctgagaagataggttgagaagatgtttgaaaattgaataaagagaagagtaaggagtaatgattagaaataattatgaaagatactttgacgcaatatatgatacaggtcatatattgtggaaaaatgatgagtatttatgaaaatagatacaagatcaggttttttcagaaagaacgcgcgtatgaagagattcatacaagggtaactgggaatgcagcgactagagataggagctgtaaaaaaactattctaagaaagtattaacaaaacttactcacatgattaaaattaatcgaaagattaatcgctaaggagaactaaatagcgaccgtgaaatagtaatatttcactacaagagttgtgaacagagcaaaaagagcagaagggctttaaaaagcaaattaaaagtttacttttaatttgagaggaggagtcccgaagcgatgagactttatgagaattcataaagtcgataagcgaagggaacgacgacgaggtcaagcgaagaagagcacatggagaatgccttggcattaggagccgaagaaggacgtgacaagctgcgataagctgcgggaaggtgcaaatgactatagatccgcagatttccgaatggggaaacccggcaaagcaatactttgtcagcatatactgaataaataggtatatgtggggagacccgctgaactgaaacatctaagtaggcggaggaagagaaatcaaaagagattttctgagtagcggcgagcgaaagggaaagaggccaaaccgatggtagtaatactgtcggggttgaggactgcgaaacgcattcggagttgatagtagaattgactgggaagtcaagccaaagagggtaagagccccgtaaacgaaattgacgaagagcgagcaggatccagagtactgccggacacgagaaacccggtgggaagcagggtagaccactatccaagcctaaatactacctaatgaccgatagagaagcagtaccgtgagggaaaggtgaaaagaaccccgggaggggagtgaaagagaacctgaaaccgtgtgcttacaagcagtcggagcacgttaaagtgtgacggcgtactttttgtagaacggtccggcgagtgtatgtatgtagcaaggttaagagcttaaggttcgaagccgcagggagaccgagtctgaatagggcgaaagagttgcatgtatacgacccgaaaccgagtgacctacccatggacaggttgaagctagagtaaaatctggtggaggaccgaacccacgtatgttgaaaaatgcggggatgagctgtgggtagcggagaaattccaatcgaactcggatatagctggttctccccgaaatagctttagggctagcctcggattagtttagcggaggtaaagcactgaatgggctagggggcgtatagcttactgaaccctatcaaactcagaatgccgcaaaaatgatgtccgggagtcagactacgggagataagtttcgtggtcgaaagggaaacagcccagacccacagctaaggtcccaaaataggtttaagtggaaaaggatgtctagttgcagagacaactaggacgttggcttagaagcagccatacatttaaagagtgcgtaatagctcactagtcgagtgaataggcgccgaaaatttaacggggctaaaacctataccgaagcttgggaatttgcataactattagaacacatatgagaaagagaaagaaaaccggctgcgaagcagacgggaaattgaagtaaggaaaaaaggaatgtgtgatctaatagttatgcaagttggtaggggagcattctattatagggagaagcatgaccggaaggacatgtggacgagatagaagagagaatgccggaatgagtagcgagaattatgtgagaatcataatggtcgaaaacctaaggtttcttgaggaaggttcgtccgctcaaggtaagccgggagctaaggcgaggccgaaaggcgtagtcgatgcacatacggtagaaattccgtagccaccgaaattgttaagcacagggacgcaggaacataatccaaccgcaccgatggtcgagtgcggcgaaagggagcgaaaattaagtagcgaagtggatgattgtacactgacgagaaaagctgtgtgtattgatgaggtgcccgtaccgtaaaccgacacaggtgggtgaggagagaatcctaagaccagcgggagaagtgttgttaaggaactcggcaaattgaccccgtaacttcgggaaaaggggtgcctgctagcgcaggccgcagagaataggcccaagcgactgtttagcaaaaacacaggtctctgctaaatcgaaagatgaagtataggggctgacgcctgcccggtgccggaaggttaagaggaggacttagcgcaagcgaaggtctgaattgaagccccggtaaacggcggccgtaactataacggtcctaaggtagcgaaattccttgtcaggtaagttctgacccgcacgaatggcgtaacgatttgggcactgtctcaacaacacacccggtgaaattgtagtaccggtgaagatgccggttacccgcgactagacggaaagaccccatggagctttactgtaacttgatattggattttggtattgcatgtacaggataggtgggagacagagaagcacagacgccagtttgtgtggagtcaatgttgggataccactcttgtgatactggaattctaacctgcggccgtgaaaccggtcgggggacaatgtctggtggacagtttgactggggcggtcgcctcctaaagagtaacggaggcgttcaaaggttagctcagtacggtcagaaatcgtacgaagagtgcaaacgcaaaagcaagcctaactgcgagacgaacaggtcgagcagtaacgaaagttggagttagtgatccggcggtaagagagtggaattgccgtcgctcaacggataaaagctaccctggggataacaggctgatctcccccaagagtccatatcgacggggaggtttggcacctcgatgtcggctcatcgcatcctggagctggagtcggttccaagggttgggctgttcgcccattaaagcggtacgcgagctgggttcagaacgtcgcgagacagttcggtccctatctgtcgcgggcgcaggaaatttgaagggagctgtccttagtacgagaggaccgggatggacgtaccactggtgtaccagttgtcttgccaaaggcacggctgggtagctaagtacggaaggaataaacgctgaaggcatctaagcgtgaagtcccccctaagataagatttcccattctttaaaagaagtaagaccccacgtagactatgtggttgataggtcggaggtgtaagtgtggtaacacattaagctgaccgatactaataggtcgagggcttgacctaaaagacataggaagtataaggcgagagttttatgaactatgttgtgagtaagaaaacttcttactttctcttttcaattgaaaaacataatatattagtttgtataacatacacttttaaataaaagtgtagccacagtagtcataaatacatcacaactaagtgatttattgacatttaaggtttgataaaactggttagttttattacatacacttttaaaaaaagtgtagtcatatttggtggcaatagcgagaaggtcacacctgtacccataccgaacacagaagttaagcttctcagcgctgaaaatacttggcgggtgactgcccgggaacataagacgctgccaaaacatatcagagcacttgaacgaaagttcaggtgctttttttatgtccgaataaataatatattggattgcagtcactacatctgaatgatgtgtgttatgaaatatcaataaattgctaagctgtgatggatagtgaccgcacttaaaaaagtgcgtataatgaaactagcttgttatatcaaaactgcaatatcaattgtggctgtacttttgtttaatttatgatggaattaaatcatatatttatgaacggttttaaaatatgtatttgtatgaagtatgatatgtgcgaaatatttgtataacttttgtgtcatataagttatgttatttgcatattgaacactgcgtgttcaggtgatagctcacctaacgcggcgcatgaatgcgccctaccgatgttcgcaaacacactttttttactctattatttatgtagatgtagtatactttttaaagtgcgtataatgaaactagcttattttatcaagcctgcaatgtcaattgttgctacacttttgtttaatattatataatatatatgctaataattaactcagttatcatataatatattacacgactgtgatgtatcgtggcggaattaattttatatttataaatggtcttaaaataggtatttgtatgaagtataatatatacgaaatattagtataagatttatgcgccgcgttaggtgagctattatctgaacacgcagtgttaaatatacaaataacacaacttatatcacacaaaagttatacaaatatagcatatatattatacttaataaaaatatcataatctatatgaaataattcatatatttgaattatttatattagtgtagctttatatgtaattagttatttattatataggatagcaggtttataaggtggaatatatatcatgtaaaactcattagttttatgaatatatactttgtttttcaaatatatactttactttatttcttaaaacaattagtttagtttgcattcttcttatataaatcatataaaaaagatgtttattttattatatcattattcagacagagattttacttttataaattattgaaaaataaaaaatgtttattattttttatttttttgcttcattctatatattaaaaacgaatcaatattatttgaatatatactcaattctattaatttgtactggacctataaaaatattcttaatctggacctaaaaatatttacttgtttggtatataataaaataaaaaatattgttgggaggaaagaaaatgtttaagagattaggagctttagttatgtctgttatgatgttaggcagttcgatggctgccgcggcagctgctgatgtcaaccttgaaggatatccttctcaaaaaggatatgacccggaaactgtaatgtggactgacaatccgattgaaaatgtattggcggagaccggaatttacggtaatgctgccgaagttaatccaaatgcagattctaaaagtaatgtgagtatgcagaatccttatgcagctaatggcgataagtttacgggctgggcatattctgaattctgctggacaaattcgtatccgataggaaacggtcgcatggcgggtatggttgcaggaggaattgataaagaagttattcaaatcaacgaagatacttgttgggatgggtcaccgtatggaactctaaaagatgaaaacggaaacacacttacgaaaatttctcagactgccaatgcagaaaaaataagcgttgagaatccgaccagcggaagtattaaggatgactggaagtatttccgcggtgcgaatgcagatggtactccggcggaaatcggttcagctgacgctattgttggtgatgagacttttagaacaaagttccccgattttgctaataaaagtatttcatatcagtcactgaatatagataattcaaaagagcaacaggctgttcaggacagatggagtatggaaagaatggttgaggagactttcttaggaagtccaaacagacaaagagcatataaatcatttgttgaggtttatcttgattttggacagcaccatgaacaggctgaaaattatgttaagcgtcttgacatgaagacaggcgtagttactgttgagtatgattatcacggtgagcattataaacgtgaatcttttgcaagttaccctgaccaggttgttgcaactcatgttgagtcaactgaagaattaaatttcttagctgagttacatacatatcataatcaaaaaactgattactataagtatgaaaaaatcagtgacaatgaagttaaattgactgcttctgtttataatggaagcaaagacgacaatgaaccaggaactgtaaacgcaatcagatttgaagctcacatgtttttagacggagataaggacacaaggtttgcagttgcaaaagataatacttccgtttcagtagtggggggaaacagcgccgatatatatgttgtcggagctacaaattatgttgattatttaaatcttgacaatacaaagccgggtaaagattgtgacaaatattcagcaaatgttaagaagagaacatattcagagataaaagcaagacatatcgctgactttaaagaacagtttgacaaaaccgatcttactattcagaacgatactgaatacgcagatgaatatagtaatacacctacagaaaagcgtattcgtaaagatatagatggtaagtcgggatttttgaccggagctgactcaagtctggaaaaagctaatgcaaacggtgtttattcaacttattcggaaggtgataatcagctggcaacacttgattttaactatggaaagtatttgattatcagcggctcgagagcaggaagagaagctaccggcagtgacgagatagatatacctgagagccagccgcttaatctgacaggtaaatggaatgctgcgctttcagcttcctggaatggaaagtatacaattaatataaatacagagatgaattattgggccgcccagcctcttggacttgatgtgtgcgaacagccgcttatagatacgtttgacgacttggctcagagcggaagtataacggctgcatatcagtatggcattacaaatgacaggggagacgaccagtacaagcctggtgatccgtgggtaatgcatcataattatgacctttggagaggcacacagcctattgacaatgcaacggcaggtctttggccgacaggtggtgtttggctgcttgaccatgcttggcagtattataatttcaataaagatactgagtatttagcagaagtatatccttatatggttggagctgctaagttctttacacagtttttggttgtagaccccaagacagggtacttagtaacagcggcttcatgctcgcctgagcagggcggagttcaaccgggaccggcaatggatacacagcttgtcagaaacctctatgatatggtacagaaagcgtcagaaatacttggaaagacaagtgaaaacgcagagcttcttgcaaagattaatgagcagatgccttcatcatatttagctgatgaaaaaggaaaaattgctccaaatattattgacgatgcaggtctgataagagaatgggtacgcggagacgtgagctttgatatttcaagcggaaatgcaacatggcaggttataaatccgtttacaaatgagaaaacaggtgtttatgatcatactgccagcaataatggtagtcacagacattgctcaaatttatgggaaatgtatcctggaacgcatttgagcgcgtatagtgaaaatgaaaatgagcaaaagatttttaaagcttttcaggattctacaacagcacgtggagccggttctggtcagggctggggagtagcatggagaatatctcttaatgcaagagctctttacggcgacacatcgtctaagatgcttgaacagttatttacaacaagaacatcaccgaatctctttgaccagcatccgaatttccaaatagacggaaactatggtattaccgcaggtgttatagaaatgcttatccaaagtcatgacggaactataaatctgcttccggcaattcctgaaagatggaagacaggttctttcaaaggatttaatacccgcgaaggcgcaaccgtagatttgaagtgggataacaatgttccaagagaggcagttatacacgctaaagagaataaggaaatgaaaattagaagcgagtatgctgcaaatgctgagatatttgacgcaaatggaaataaggtagaagctaaactcagcagtgataatactttattgtcatttacagctgccgaaggtcaggattatacaataaagaattttggaaatgaactgaatccaacatctgttcctgagccaacagaacagccgattaaaggaagcccggttccgagtaatactcctgtaccaacacttgcgcctaatgttccgcatgtttatgatataaatgcgtcttattatgagaatgataagttatgtgttgacgttacatataatggaacagagtcagagcctaaagcaaaggttttgattggtacatatgattctcagaatcaagaggaattaataaattcaagtgaatatgatataaccggctcaaatagatatgaatttgattacgctaagcctcaggatggtcaatttgtaaagatatatgtttgggacggaacaaattcaattacacctttaagcggtgttggaacaataggtgaaaagcctgttccgactatagagccgacaaacgctccaactgataagcctgtacctacaactgacccggcaagaaccattacggttgatggttcaaaagaatctgaacctgctgccggaacttataagacaattagagaagcggttgctgcagtttctgctaatccgccgtcaaatgaggaatcaagaatttatataaatgttgttcccggaacatatcgtgaacaggtagttataaatgttccttatataacattacagaaacagcctaattctcagggagaagttaagcttacatggtactatggaactaatactttgtatgacagctgtgatgagagcggatattacaatcctgatgtaattgacggaggggttaccaaaaacgctcctaaggattggggtccggccttagtggtaaaagaaaacggcgacaattttgcttgtgaaggtttgtatctcgaaaactcgtttaatgagtattacactcaggaggagttgaacgaatatatggctcctgccgaaggttcatttgacagaggagcatggcttaatgaacagctgaataacggtgtagatgacgaaacaataaacggctggattcagtcgcgttcacctataattaaggatacaaagccgagtttgagagaaagagcagccgcaataaatactaaggctgacagaatagtatttaaaaattgtaccattatgtctaagcaggatactatgggaataaacaatgacagaatttattttgaaaattgtaaaataggcggaactgttgattatatctgcggaagtgcgacggcagtattcaataattgtgagttatattggaatgccggaccaataaaggaaacttctaaatccacagacacagattcgggatatattacggcgccaagccagtcaacacaaaaaggttatgtattctataattgtaaggtaacgggctctgaaactgcaactgcaggagcatttggcagaccgtggaatccaaatggagaagcgatatatattaacactaaaattggcacaagctcacgaccgggatacaatgcaaagtcgttgataagtgaatccgggtgggcaacaatgagtgataatccgccggagaatgcaagatttggagagtttggctcaactgacataaagggttatcctatacaaatttcaggagatttaagacagagtaaattactggacgagtggacaatgcttgaatataatccttatagttatacatgcggtactgacggttgggatccgtcagggacagctgagtcttataaatctgtaaacagcgttgctgaagcaactaacgttgaaattccggaaggaacgagcacagaggttgtgctcccgtctgctccaaacggttatgaatttagctgggcatctgagtctgaatatgctgtagtaagtgaagacggaacaaagattattgttacgagaccggccagcggtgagaaaccaatagaaaccgaaataattttgtatgttagaaatgctgacgcgaatgctattggaacaaaagcggttaaacctgtaacaattaatccgacaacagataaagaaaatgtgtttgaagtaaacggtactgtaacaagtacgagcggagcgcctgaaacagatattcctatcagcgttaagctctataagggcaaggcagtgattaagacagcttctgcaataataaaggcgggaacaacttcggcgtcatataaggctgaaggtatacctgttggtgattataagctggttatagatgccgaaagctctgattataaggttacagtccctgcagacggcacggtagaaatatcgggggcaaaaggagatattaaaatggttgattcaagcgttggaaaactgacccataccgttttaaatattactactgacccaacagccatagggagcggagcttcagttgttaataataatggttcatatacagtttcaagcccaagcggaacttctgacggcgcatactggaatctttccaagttagcagagggagtaaaaacaagtgattcggttactgtttcatatactgtgacattctctgccgataagccttataagcaggatgatatgggatgtatgattgatgttctttcgggaataccgggaactttaaataagaatgctaatcctatacgtataaacagagttaacatgggtcgttgggatcagatgaatatgctcgactttgcccaggcgtcaagaagcggttcacaggataccgagcatcaatggctaaaatgtgccggagaaggtatagctaagaactcatataagccacagtcggtaaaagtagttacagactttaaaaaccgtgttatgacagcctctgctaaggttacagaggcggcaagctggaatgactatacgtttaccggattccctgaagaagctgatgttgaccgagagaatatgtgtctcgcagtatatccgggaagcgcaggtgcaaataattatgtcatcagtgatataacagttgagtttacagaatttaaataagaagatattaaatatttcttcaataaaaattaacggattttgattcttttatatttattagaaagcgcagcgaaagctgcgctttcttactgtcggtaaagtttgaagcgtttagagatatgtgcaaaagccaatgttttaatccgcgcgtccgtgggcggataagaacgaattgtacttttaggtggcgttttcaaacagttttcctttcctcagcagtttttctaacggcttgataatttgaggagcctcccttgtttgaaaaattttttcgagactacttttcaatttgctaaaagctcagttttagccgagctttatatcaaaatattaaaaatgataggcgaaagctagatgtgcacaccagcaatataaaataaaggttaagcagaggtggaaagctatctatttaagcagcgataaaagttatctgtctaaggagtgatgtggattttttgttttaatatttccgctaataatataaaattgttaagctataaaaacattaggctgattagtttagccaatttttttgttattcaaatctcatatttcacctgcgtatgattttgtttcatttggcatagtaataaatccgtttttttgatatttatcaaacaagttttcaagcgctgatatatatgcttcataattcggcgaatcttcaggaatcatatatgaggcagactttaatctttgtataaatttttccttagtaaatttaagatcattttggaatactttcttttcatacttagtttcaaaaaagtttgaaacagccgaatccatattttttataccgccgctgaatccggtaaatccgggacaatatttttggcatatttccgcattttcttttatcattttattggatgaaactctggaattccaaaccagtattacctttccgccgggttttaagattcttttgcattcagctttgaattttttatggtcaaaccaatgaaacgcctgacctactgttatatagtttacagaatagtcttcaagagcagtgttttccgcgcttcctttaacggagttaaatctttcatttcctccaagcagtttttcagccgtatttctcatatcatcgtttggttctacagctataactgtgcagcctatatccagtagttgggatgataaaatgccagttccggaaccaatatctgcaacgatggattctagacccaatcctgccgagttttttagatactgaataaattgttcagcgtatttaggtcgtgaagaggcgtaggcagaagacttgccggtgaatttatttgtattgtccatattcatcctccttaatcctttttaacttctgctattatatcattagatatattgaatttcaattaccaagatagattcattaaaatcaaaaatatgaaaagtttctaaaaaattagttaagtttctaaaaaactattgctataatttgggttggcgtatataatataattctgagcgtcatatacatttaaaaggcgcaatatttaattgaaatttaaaggaggattttgctcgtgggtttaggttttatagaaatacttaagacgatattgctgggcattgttgaaggggtcacagaatggcttccgataagcagtaccggacatatgatactgtttgatgaattcattcatttaaatgtaactcctgagtttaaagaaatatttttggttgtgatacagctcggcgcgattcttgcggtcgtggtaatgttttggaaaactatttttccatttcattttaaaggcggctttggagtagataaagagaagataataatgtggcttaaaattttggtagcgtctattcctgccgggattataggtatcctgtttgacgattattttaacgcttggttctataattactggactgttgcaataatgcttatcgtattcggtattctctttatatggatagaaaatgcgcataagaataagattccgaaagtgaatgatatttctgaaattacatataaagccgcgtttataataggagtattccagcttattgcggcagtatttccggggacttcacgttcaggcgcaacgataataggtgcccttcttttgggcatctcaagaacaaccgccgctgagtttactttcttcctggctataccggccatgttcggtggaagcgcaataaagcttgcaaaattcgggatggcatttacctcaagcgaaattataattctgattttaggaatggcggttgcgtttgtggtatcaatgctgtcaataaaattccttatgaattatgttaaaaaacatgactttaaagtgtttggctggtatcgtatagttttaggcgctcttgtgattgcatactttttgttctttggcgcttgattatgttttggtattgttataaaataattagatatgaaagtgagatataaaaaagacctcgctgtgtattgagctaactctcaaaagttagattactggtctaacttttggaagatcggttcatacagcgggtctttttttagtggtaagatgtttttaatatgttgtaatatagccaaattctcgttctatataatgttctccgcattacatgacgagtgtcttcggatatatgacaattttagtcttcggtaccaaattttaagctgatgagccaaattattctttggaaccaaatttcatgttattataatacttttttaattttcttcactgtctgagagtttctgaggtatagaaatgaaaactattacattgtcattttcgtttgaatattttataataccattcatgtctttgacagctttcttaacgctttttatgccataaccgtgctcagaagaattttccttgtcggttttacagttgttagggtcaaataacagacctttgacagttgaatttttaactataaattttatcattccggcgtcgctgtgtatgtgaagagaaacttcttttgcttcggatttatcagcggcttcaattgcgttgtcaagaatattaaaaagtattgtagtgatgtttgaagaacttacagttatatcatgtccaagttccatatctatcttaaagttgatattctttaattttgcctttttaatttctatatttatgatagaatctatggtttgattttgggtatatactacaaaggtatcagaatagtttttgtttttgatatctgaaagatgagttaaagcggtgtctgtatctccgtttttaaccagcgaatatacaatatccaaatgtttgcgtatatcatgttttaaacgtcgaatttctttttcattttctttgagcagagtatagttcttgttgtaatgctctatagttttttgagcaatgccatactttaattgcgcagaataggtttcaaacaaatcaaatattgcaacattgatatacacaagacctatgtatggtataactaacagtgcatagttggtaaattgtgatttcatcaatatagcgtcaataataacaacaattaatatagttactaaaggacaaagtataattagtatccaatacttaataggaagattgcgttgttttttaataaacactttaatcattggaaaagccaaacacagcgttagtattgttgtagagcatgcagctaatattagtgaaaagtcggtatttaatatatctgaatatgtatcatcaaatagttgagataatataagcagtgtagccatttgcgaaattatataacaaacgtaatatattactactacagctatttttttagttgctttatcctcaaatgagaaaaaacagaatgttgtataacaaattattgaaattattaaattagcgttactatttaaatgaaatgttgaagtaaaacacaatattaaaaatggtataagtgcccccaaaaaagataaaacagaaaactttttgaatttaaaagcatagttaaaaataatagttaaggctataaattcaataataactatagatatatcaagtataaggctcattataacattccctctttaacactatatttaaaatattggttctcaaaatcttctctatatgatttacctattggtacaacttctttgtttatcataacagcctgcgtttttgaaacagagaatatattttttaggttaatagcaaatcctttatgtacacgaacgatataatcgcagtctaatgtgtcaagcaaatcagaaaaagttgaacgtatagtaaaatctttatctagcaaatgtatacataaactattatgacacgattcaatatatacaatatcatttaaaagaatattgtaatgtattccattattaactatctgtactttattattgtttttaaagtattcatttataattatctctatttcattgcttaattcttcgatagttgctgttttaagtatgtatctgtcaattccatatttgtaaccgttgacagcgtaaccgtcataatgagtatacgcaacaactatacagttctttgaacgtgtttttaaaatccttgtagcattaagaccgtctaatccttcaacttctatatcaactaaagcaatatcaaatacttggctgcaatttaaaaaatcatctgctgtagagcagactgttaaacttacattatatttgcttaatactatgcgtaatttgtcaatatatatattttcatcttcataaattaaaacattcataaatgctctcctaacttcataaaatattatatatcacacatgcgaaagtgtcaaccaatgtaaaaagtcataaatgtggataattctttaaacgttatgaaaaaactattttatgataattcgaatatcgacaaaattaaaaatttgtggaaagtgaataaatgagtgaaaataattttggtaaaatttaccaggaaagttgttgccgaaaattcatttataccataaaataagtttacgtcccagtatattgattttgatatgacaatactttataatttaactaaagaaaaatgttgaaaaaagttacccgcagaaatgggaggaagcaaattgatagaaagcatttctaaaacgctgacaaatttttttgtaagaaatggtttaatcaaagaatatgacagtgaagtatattcttatggatttgaaatgtttgtttccgaaataataagctggcttattataatacctatagcaattatatcaggtgagtttttagaaagtatggcttttgtatttagctttattatttttagaacatttggcggtggctatcatgccaatacccattatggatgtatattcagctttacatttatttatttggttggtttaacggttggtaaatttatttcaatggatttttcttattatttgataggagtttgtatggcggcagcggggattttgctttggatatttgctcctatagaccataagaacaaaccgtttgacgaaaatgattttaagcgtcttcgcaaaaaaacaaggctgctatacttaatttatttggcagttgttatacttttattaagtattttcccatcagttaagtttgttgttaagctttgtgcatttggaagtatggggttgtttatggtatctatgtcggtcatgattcaattctttgtgagaaaaaaagaaaaagttaattcaatataaatttaaaaaggagagaaaaatcatgaataagttaaaacaatttatgtaccgatttggtggaactatctgcgctattgcggctttcatggctgtatatacagatggaagatgtggttggaaaatatatcagccaaaggcaccagcaaatttgcgggagtttgctgagagacaaagaaacaattagtattgtttagaatctaccggaaataggttcaaaattaatgcgataaagtttctgtttggtgatgtatataatgctgatattgagtttaccggaaataaattcaagttcagtaaactaggatttttatgtttgctatagtaacagttaaacatattaatactaaatgagctcaaatatattaattgtgttttcaagttatattatgatatatgagtcaaaattttaaatataaatttagtggtggatttaggtagtaaaaatgaaaacacaaaatatattttaattaggactgtagcagatgttatttttacatcgttacagtcctaatttttagaaaatataatttgataaaactttttgtgatattcgaaaaaactataattaattataaagctattacatcttaaaatataaattaatagtataaaatatttatacttaataattcaagtcaaatgttcttgcaaaataaatgattatgcatgtgtgtaattattgacaaatataaaatttttataaattatcgtagttttaaaaagcattatatatcttttttttaaattttataatacataattattttgatacaaactgtttttggataaagtgttaaatagcttataaaacttaagtataattaaaaggaacaaacacatgcataagaaactgaaatgggataaaaacacgagaagtttttgtatatagataatttttaatcatttggaataaatccatcaaacgcttccattaaaaatgattattaatacatatatttctccgtttcagttttttatgagttgttaaattttggaattccgaattttatgacattgtataattgatgaatcgcattatttaaatgtttatattaaaatccgtaaaataatttttcatattaagttgataaaaatgatataagtcagtaagacggatgaatatagcagtttaaagaagactgctatatgttgatattttatgtatttcattaacagaaatagagctgttacttagaagaaaaaaatatttctcttgtttaaataataataaaaacgttacgaaaatttagatcgtaacgttttttatttaattatttaaataatgatttatatgtaactaattctttgccgagacagaagattctatcattttataaagctgttcagagtctattggtttagctaaatgcccattcattccagcttcgcttgcttttaccatatcttcatgaaatgcgtctgctgtcattgcaataataggaattgttttagctttgggatgtccggattttcgaatagcttctgttgcttgatatccattcatataaggcatttgcacgtccataagaattatgtcataatcgtcaccgtttgttgtgaagcgttctacagcttcttttccgtcgcttacacagtcaattttcatacctgtcattttcaaaagttcaacagcaatttcacggttaagctcattatcttctgccagcaatacattgagaccatttaaaacgggatttggctgattatctttattgttttttattgctctttcaattcccgttacagtcagcagcgtattataaagtgtggaagcaaatataggttttgaaaggaatgcgttggctccggcttctcgagccttttgttcaatagaactccaatcataagcagtaataataattatcgttgtattaggacctacaaattcacgaacacggcgtgtcacttcaataccatccatgtccggcattttccagtctataagacatacgtcgtattcttctccaaccttgtgtgctgacagaacctcatcaacacattctgctccggtcattacccacttcgatttgattccaagattctcaagaagcaatgtagtatggatacaacaatcacgatcatcatcagcgacaagaacttttaatgcttccagtactcgatgattgtatgaagacttttcttctttagattctgcagtatcaaagtctaattcgactttaaaagtgctgcctttctctaattcgctgttaaccgagatagtcccgtccataagcgtaactaaatttttgcagatagacattccgagacctgtgcctccaaattgattgcttgcggaagtgttttcctgctcaaaaggaaggaatatacgttttacaaattcttcactcatgcctataccggtgtcacttactgtaaaacgcagacgtatacgtccgtttttcttttgtatctgccgtatttccatgcggattgagccgccaggcggcgtaaattttattgcattggatagcaaattaatcagaatttggtttagtctaagcgagtctccaattaatattgtatcggttaggtctatcaaaggcattgaaaatgttatacccttttctgcagcctgcggatatatgattgatgtgattgattcagccacgctttccaggttaaaaatctcgtgggcgatagtcatttttccttcatcaatttttgacatatcaagaacgtcgttaataagtgtcatgagatgcttagatgagtatccgattttttccaaacagtcttctacgcgcttcctgtcttctatgtaggcgcccgcgatagtagtcattccaattatcgcattcattggtgtccgaatttcatggctcattctagaaagaaagttttgctttgcagcgttggcattctgagcgtttatcagggcgtcttttaaagcctgttctttaataattttttcagttcgatcagaaagagaaacaatatagcgaactattttgtcttgactgatttgagggaagctttgcgccaaaaaccagcgtacttgtccggatgggttcttcattctgaattcaacgcttttgcttgacgttgttccagttggcttaataaactccataaaatcagttttatcttcattgataatcagattcaacaaagaatctgtttctttaaatatagagcgttcttttatgccgagaacacgctgacagttattgctgacatactctaattctgcatgctctttgttatagattaaaaaaacttcatctacgttggaagaaagaatatcaaacaagtgttcgcggtattgaatctcgtgaatgttttttctttcacgccaaaaagcaaataaaaagtaagccggcaggaagatagtgagtaataaagaagaaaggatagctgtggttgctgtattagcggaatgtttttctaaacccttaattttttgatccgcaaacgcaatgatttttgtcagcgctgcgtctacagcgtcatatttaggatatatattttgctctacatataaagctgtttcttctttagtcattggtaaaataataggcagtgaatcattttgagtgttttttaggtcattcattgcattaagcagttggatggtgtcttcactcggtccaagatattggttggtaataatttcaattgcattatattgcatattataacggccgtttaataattgctgaacattatctatctcccatgaaggttccgcgacaatatttaacagaaaacttttcatgtccagcaaacgtgaccgcattgcacgagactcatttgagacagtgtaagggtggttataaatcattgaagctgtttgatgaagctgataagtagaaaaaatgctgaatgtggatagaaatatagaaaatgcacaaattataaacattactacttttttgagtttgttttttcttttttgcttactcattaacatatactcctttgtcccccgagaatattttcgctattagatgatttaaggcaggttatttttcgatcataatttttaatagaaaaaacattaaatttggacatttaaaaattatatatacaagtgttcaaaatatctcccttgttattttgattgtacatatggtaatattttattaattaaaaaaatacaacacaaaccgacttgttatataatttatatatatacaagtttctaaaacaattttaaatttttgtgcctaaataacaattttatgtatatgtaatagctgcaccatattttgttaacgtttattataacacgtattaaatataaaagcaagatattatttaattctgatttttaattaattttattgcagaggaaaataaaatagcggcaaaacagccctaatctgtacggactgtacaaattaaggctgtttacatagctgacgtttttttatgtagagtgcgatattcttttggtgttatattgaaatttttcttgaataccctgttaaatgtgcgggagcttccgaaacccgacaattcaccgataacagtaagaggcagttgtgttgagcgaattaactttgcagcatgttcagatctaagcataccaatataaatgttaaagctagtgtttagtttatcagaaaatatatttgttattatatgaggatttacaccaaatttatgagatatatctttgagagtaatgtcgttattaaaacttgtttctatatattttaatattttgcacgttagattaagagaacccagtttatttgtttgaaccaaatctatactttctattaagtcggataacaatatcatactgcagcttaataatataatattatctgtctgtgttaagatttggttaaatatcatctttgatttatcaccggctgtattttgggaaattttatagtttttttgtttcagtatatgtatatttggacaaacttgtttatatatctcgggttcatattttaaaattaaaatttttgattttatgttatcgcatgtagagtaactatgaaggtattccggaaatattatagctgtatcacctgtattaagaatatattcattgtctttaattttaattttttgactaccctcaatgacttgacaaatttcaagctgttcatgaatatgtcctttagtatttatagagttatttaatttataaaggttaagaccgtttataagtttaaaatctgaattcatattttacaccccatattataaatacaatattttatattattttataatcagttttttacggtattctctgggagttattctgaaattattataaaatgttcggtcaaaggtgcgtacactgctaaaaccagacatggtactgatgttttcgagtgagtcgttggtacttcggattaattttgcagcaatattgcttcttattatgcctaggtaagttctgaaattaactccgatttgctcagaaaaaattttagaaacagtgaatttattaatatataattcctttgatagtgtgtcaagagttatattttcacggtagtgttcctcgatatatgatattattttatattcattgctgatttttatattattattaattgggattggctcaagttgattaatgagtttttttactgctattgtacagtagaaaaactgacgaatttcagaaaaatcttctatcatgtacttgaaaatttgtgacatgaaatcatctatttgatttttatatattttgtattgattaaaggtgtagttatcgaaaaactctttaaattcttgtatacgctgtgatttaaaaatgatactaacaaattcggcgtttttattatatttgttgttttcctcagaatctattcgaaagcagctgtgcacatatccaggaggtatgagtacagcttctccggtatttagaatatatgtctgttcgtttataattaaatgttgtataccgctgaataagtatattatttcaactgaattatggatatgaggcagaaatttaacttcgcgtttgttatgaataatacgaatatcttttgtattgagttcataatatggctcgtttgacattataacaccgcctttagatattctttattttaattttaacacacaagaaagattaaaacaagacaaaaacagagatgaataagacaaaaattgaatacaaatggttaaataaaaagttgacaatctttgtctgaaactgctccttttttgtcttgttaataaaatacggatatgttatattgactttagataaaccggttgaaatcatctaaaaattaatttttaaattgaaaggagaatttaagatgataagaagattgttttgtgttttagcagtaatgtgtatggtgatggcattagcggttacacctgtttgcgcagaatatcccagtaagctttcagcaagagaattattgaaactatctttagattactgcagcagtatggatcaaagtaaatatataaatgaaacatgggatgtgtttaatgaagcgttagaaaacgcatggaagatatataataattccggagcttctgaagtggacatgactacagcaagaggaagtctggaaaaagagaaatcaagattaaaatttgtgcagtctgatgagcctggagatccattaagttttcgtttattagataagaatgaagttgtgaatgaaatgggagtaggctggaatcttggaaacactatggatggaacgagcaacgattggagcgacggatatatgattccgtgcgaaacaggctggcaacccaatgtgactactaaagaaatgattaaatctattcatgatgctggttttaatacaattcgtattccgattacgtggggaacaatgattgatgatgaagatgggtattctataaacccggattggatttcaagagttcaggatatagttgactactgtattgatttggatatgtatgcaataataaatatacatcatgacggtgctgaacaatacggatggcttcgcgttgcggcagacgacatagatagtgtatatgaaaaatttgaaggaacgtggagaagtattgcttcatattttaaaaactatgatgagcatttaatctttgagtcaataaatgaactgacatgtatggaaggggatatgaaaaattccagtcaggctaaagcctatgatatacctataattgttaacttaaatcaaatctttgtaaacgtggttcgctcaaccggatcaaacaatctttatcgctatttgtcggttgcctcccattatgcaaatgggggaactgaggataatttcattatgcctgaggatacatataatattgataatagattgatgtttacaacccatatttataaaaacaatacttctgtatcttggaaatatgatgaagcttatgaagttattaatgttttgaaaaaaatatgtaaaaagttttctgattatccgattatattggctgaatatggaaatagatatcacgagtttcaaggtaatccttcgggggcaaatgatatacagcgaggatactatgatgaaatagtaacgaaaggaagcaaagtttgtggtgctgttccttgtgtgtgggacaatggaacaggaggagacttttctatatgggacagagtcaataataaaccgatatggaagaatattaccgatagtatgatgaggggacattatattgagccttccgagttgaatttaaatgatgtaaatctgacagatataattgaaaatcctcaaattaataaaataactgatataagcggactgcctgatagtttaacactggaatacggtgaggttaaaaatctaaattttaatactgagcctgcagaaacaaatgatgtattgttatggaagtcatcagatgatagtatagttactgtacatagaggaattatgcgtgcaagagctgtagggtctgcgacaattacggttttttctcagagcggaagctgtgaaaaaacatttgctgttactgtaaagccgtcaatttctgatgttcctgcaaatgaaatattgactgctaaagaaaagtatgaaataggtgaaaatagagcggaatatataaatgcccaaatattaccatcagaatctgatgatgatttaatatatgtttcagatgatgattctattgttacagtaaataaatttggaaaaatggtaggtgttaaaataggtaaagcacaggtgacggttcaatctgcaagcggtcttaaaaagaaaatagatatagaggttgtagacgctgaaccatattaccaggagattgaggagacaataaaatctttaaagtttgaagatgatggaaaatctgatacaattccactgccaactgtggatgggtataagtttgaatggaagacaaataccaacgacaaatattcatatgtgaatgatggaggagccattactgttattaggccggcgtatggagaagcaagtgttgagtcaagtgtaaaggtaacagcctataatgaaattaccggatatagtttaacatcaactgtaaaatttaatatcagtccttatattaataccgatggttccggaagtgttaagtgtaatttttatcttgacaataaatataaagatgccgaaacttttgttataaagttctataaaaagggcgctttagtaaagagttcttctgtatctgttccttcaaatgttaatatatacagtgaatctataagtggtatcccgaacggagattatatagtaaaatttacgcctacgagtgatgttatgagagtaaaggagtcgtcacaagaagttagtattattccggataatgaaacgagtttaaatgtattagctgcacaaatggtgtatacaaatattaaagcgtgtgaaagcattagtccaactgataatattacagtaattgattttcttgaaaaaatgactgataaagaacgtcaggattttaaaaattcaaaaacgataagattaaattacacggttgtagtatctccggaaaacattagtaatactgcatttatagatatactgggaggagatattcctgttgagtatcaggcaagttcggacagttcgagatatacacgtttgagaatatacaaaagatggaatcagcttgatatgattgatggaactttggctaactgcagcggttctaaggatatagaagggcaccaaaaattaaatattggcggaaagtttcaagatggaactatagaatatcaaatctcgcttctaattgattatgagaatcaaacaattacacaaggaacaaaatcgtctgttggttccagtgactttatttttacaggttttccggctgacgcagatagatcaaagcttaaccttattgcgtataataatttgggaacacaagaagtatatacgataaaagatgttactttatcgtttgagcaattggtttatccggaagttgatgattttaagtattcaatagttagtattaatagaaatgcaaataacgttgaggtatcagtagagggcgaaggagaggcaaaacttatcttagctttatacaatggttctgacattttgttaaagactgatatgaaagagattaacggaacaggaacttatgattttatggattatataaatagtgaagaaccaaatatatcactgaaagcatttttatggaaaaatactgatgagataataccaatatcaatgcctttatcatactaatatttatattattatagattgtaaagttggtatataattagaattagtaaaatgattatttataattaaatttgatagctgctctttttataaagtttattaaataatttattagtttcatggatgagaatcatattgattaaataataaaaaaaccattgcttaagcaatggttttttggcggagatggagagatttgaactctcgcgccgcgttaacgacctatacccttagcaggggcacctcttcagccaacttgagtacatctccgaattcgctgcagttagttttagctaaaccgctctgtattaaatttgaaaaaaacgacacagaagtttatcctgtgccatagcgcctttataaaaaggaatggcggagaggcagagattcgaactctgggtgctttcgcatcactagttttcaagactagctccttaaaccgctcggacacctctccgtattatacgacttttaggacaaacctatcacgtcgcgacttgataagtataccatatactagaaaggtttgtcaacactttttttaaaatttttttaatttttatatgactttttttctacataattacagcttcggttataaacactgccaggcttgataataaggcaacagttattaggctcttttgcatatatgatagcgctattgctgctgcaaagcctataacagcagaatatatgctagaggttgaatagagtatagccgggaatatcatggcgcctaaaactgcatatggcatataaaaaagaaaggataacagaaaacggtttttaatcttttttcttattattgttaatggtatcattcgtattaagtaagtaggaacggccataacagctatatatattaaaattttaaggttgtccatcgatgccatccttcccattagtttcatctgtatcaattggggcgaaataagcgcccagaccggcacatacaagtgcacagattattattacaaaaccattcgataccatattaagaacaggaaaccacttaaagcacgagctgagaagcacagctcctaataatacatataaaacagccttattatcttttgccggaggaacaacaatggctataaacattccgtatatggcgataccaagcgcgcttctgattgattcaggcagaagcataccggcggcggctccaacaagtgttcctagagcccagcctatatatggtattgtcataagtccgtacatatatttgggtcccaattgagccggcttagttgtggatactgcaaaaatttcatcagttatgccaaaagctattcccatacggtttaatcctccgatgccgccgaatagcttttgagataccgagactgacataagagcgtatctcatattgattacaacctgcgtcattgcaacttcgagataagaagctccgccaagcataagggaaagcccggcaaattgtcctgcagaggtaagatttgtcattgaaataagaagcgccgcccacacaggaagtcctcccattgccgccattatcccgaacgtaaaggataccgacaggtatcctaaacctatcggtattccatctctcacaccttgagagtatctgttttctataaattcttttgtattggatttcataataacttgttttgtttgtctcctgaaatttattttccggtgcttccaaagccgccgtttcttatacctgtcgcatcatcgtcaacggtgatgccgtattgaacaaatataccctgtgcgaaagcgtccccctgttttagcgaaacagtttttcctgtatttgtgtcgtttgttatttttataaaaatatgaccctcgttatcagaattatagtagtcgctgtcaattattccgacagtattatttaactgaagtctaaatttaaaaccaagcccgcttctggggtaaaggcataagacccagctgttgtctatttttgttcttattccagtgggtatcattattgtttcatttggctttagttcaaaatccaaagtcgaataaaaatcataaccggcacttcctgctgttgcgcgttttgggagttttatactttcataagttttttttattttatctatatcagtactgccgaagcagttattccatccttcggtaaactgttctatactgactttttcaaattttgctatacctgtcataatcgtctcctttatgttgattttatgcttttgtatacaaaactatatcatcgcggctttgtttaacatctatgactctttggttggtgcttccgcgccaatgtagttttggatccagtttgtctttcacaaatttcccgtcaataagtatatctatgtatcttataaccgtcaagtcttttatgtcttcccaattgtatccggtgtagagccaaatagttttgtccggatatttttcttttatttcttttgctagcgtttcaaccccatttatattagattgatataatggatcaccgcctgtaaatgttataccggatatatgtggtttgtcaagttctgtaaaaatttctgacttttcatcttctccgaaaggcagtcctccgtcaggatcccaggttattgggttatgacagccttcgcatttgtgctcacagcctgctacccataacaccactctcagaccgtctccattcagcatgtcgtctttggttatattatgatatcgcatatcttacatacttctcctgtctttaatttcagccattttcgcatcgttaagccgggtgtctcccttaacgcgcgaatatgacaaatatccattcatacggtcgattttagtgaggtttttgcttccgcacttaggacatacgtccatttcaagctcgctgtgaccgcagtcgtcgcagtatgccaacgagagattaactccttcgtaaaagcccatatccatagcccggtgaatcaatgtctctattgcttttttattatagtcaataggatattttacatattgaatttttccgccgttcataaggtcccagaatcttttttccaaatcttgttttctgataggagaaatatcttctgaaacatgacagtgaaaactgttgctgacatattccctgtcggaaacgttttctattatgccatactttttcctgaattgttttacctgcagaccgcacaagttttcagcaggcgttccgtaaagtgcataaaggtttccgtcttcttctttaaactgagctacctttttattaatgtgttccatgacttctatagcaaactgtccgtcttcaaccaaagattttttattgtgaagctgctgcagttcatttagagcagttattccaaaagaggcggtagccgtctttaacagcggctttatcttgtcgtgaatacccaaatgtcctccgtaaaatccgccttcacaataagcgagaggattggtggaagcccgcatttctcctagatattcataagtgcgtatatgtaactttcttataagctccaaataatagtcaaggacctcatagaaatctttgttttctttttcggccttagcgtatatcattggaaggtttaagcttactgcgcctacgttaaatcttcctacatataccggtttatcattatcgtcagcgggattcataccgcctttttcgtaccacggtgacaagaatgcacggcatcccataggagatacgactttgttatatttcttgtatataccggcaacatatccgtcgcctgtaagagacagccaatcaggatacatagttttagcggagcattcaactccggccttgaacacgtcttcaagctctttgcccggtccgtgaagattctcatcataaagaaatacgattttagggaataatacaggtttcttgcattcttttttaccctgaccgttcttgtgaacttttaagagtgagatggttgccattttttcaaagcgttttgttccgagacctgcggtaaccgttataaacggataatcgccgcggctggaggcaacagtgttaaacttatattcccagccctgaaagccctgttcatagtctctctgcacatcttttatagtttcacgttcagctgtttcctcagacaaacccatttctaaatagcgggctttattttggacatatgttttttcagcatacggagccaaaagtttgtctacttcaggaactgtaaaacctccgtattgctgacttgctgctgacaatacaatgtcgcctataacatcaaaagcaaccgctaaagttttgggttcgttataccaaaggttgcccatttcaaaaccgccgcttaaaacagttttaacatcaaacagacaacagttcatggtgtctcgtcttgcggacatatcgtgtacgtaaatatagccgtcgcggcaggcctggagttcctcaacagtcataaagaacttttggtaaagttctttgttgagctggttaaaaatgagtgagcgtttggtggaaactaaagctgaatccgagtttgaattttctttgtctcctatgtacataattgcctgactcttttgatagacctcgtccagcatatgaacaaaatcctgcttgtagtttctgtagtctctgtagcttttggctaccacaggattgaccatatcaagcgcgccctcaactatgttgtgcatttcggcgatatggattttatccttttgcatattaagaaccctgctgtctacgaaggcacaaattttgtgtatgtcttcatcagtaaactcaactaaggcgcggttagctgatttttttactgcgacaactactttctttacgttgtaatcttcttctgttccgtctttcttaataattttaatcatacaaaacactcctaaattatactattgtgcggatttaagtccggtaaacctttttgtgcggaaaaactgaaacgtaaaattgttgtttaaatatatgtatttggcaatatatttaaatctctaatgctttattacttaaaactgaaatttcgggaatttttctcgaatcacaacattttgcgttaaatgtaaatttactaacacaacatatagtataataacatatgttgcaaaaaaatacaatggctttttttgtcttatttcatgacttttttgtaacatcaataaagcgttatataacggcacttctataaaaactattggctttttgtaacacaactttaattgaaactactaaaatattgtcaattaataaaatttcggtatataaaaatatggtaatattattttttgtaacgttactgtaaccggtcgttaaactacatgtaaaaaagattatagcatattcaggaaatcaagacaagaggaaaatataatatagataaaattcagatataaattaaaaataaaataattccaaacctaaataagaaataaatagtgtttggatttaattattaaggaactggaaacatttattaaattccttgattttcaggtttggataatgtataatgcttgatagaaaataaaggctgatggttatattttaaagcatatcctgtcggcaattttggagaacggcaaatgaaaaagtcaatttgttccataaaaaaagttattctaaaagcacttatgtttagtgttttatttttgtttccgcttaacggttcgttttgttatgcaatggttaacggcgcagggcggcagaatttgtacagccaaaatctgatgttaataacggtgatgtgctgcgtcattttaatcttgttaatatgtttagtgtttctagtaaacaaacttcttaaaacgaaaaaaataattaataagaatatggaaaatgaaaagattttaaacggtcttgtaaatactgttgtgtataagattatgcctgacggaatagaaactttgtattacagcgacggagtgccaaagcttttggatatgaccaaagatgaatatgacaattgggtatcagacggagacttaattgaaaagtgtgtatataagggggatttgccccggtttatgagaatgtatgaaagagtgttaaataataaatatcctaatatgaatataaattttcgattaaatacgaaaaataatgttcatacttggatacacctcaatgcgtttagaatacgtgaggagaacggttatccggtatttgccgcacttttttcggagggttcggacgaagctaaaatgtatcggaaaataatcgatgattctccgaccggcgtttttgtagcatcggtaagtaatgatgaaatactctatgccaacagcgccatgtatagattaggattgtgtgacagcggtgagattttaggcagaaattgctatgaggttttctttggccgcagagaacgctgtgagttctgccggaaagaaaatttgagttataactctctgctggtatgcgaattgtttaacagggatatgacaaggcattactgcaacagtgccagactcatagattggaacggtattcctgcgtatattgaatacataagcgaggatacagaaagtttttttgcttataaaaagcgtaatgacctgattaataatttcccaggcggcgccggaatatgcgagatggaagacggcaagttcagggtatcttttctcaatgaaggctattataaaatgctgggacggaatatggaagattctatgagtattgagaaaaatcatagtctaaactatatttatcctgatgacaaaaagaaaattttaagtgaaatagcttctttaaatgaatgcggacagataggagaatgtacggttcgtgttgagacaagcgaaccgggcgttttaaaatggattaatatgcgcggcaccttgtctgaaaaagacggggataaaaaagtcttttacgtttctttttcagatgttgatgaatcaaagaaagccagtattaagcttaatgaagcatataagaatcttgaactcagtgaaaagatgctgaatgaggcaataagacattcagaaataaaattatgggagtatttcccggagacaggctgcgttgtttggacttctccgtttgaaaatgattttgacgcggagaatcttatggaaaattatcctgactcgtggattgaaatgaacattaccgcgcccgagagcgttgaggatttaaaacgtttttataatgaagctaaggctggaaaaaccgaaggaacctgtgagataaagaataaatttaaagacggttaccgctgggagaggctgaattttacatcaatcccgggcaaaggagaagagcggacaaaagttattgtcacagctatagatattaccaagcaaaaagaagctgaaaaaaggttcgaagaggagcttgcaagaaagagcgcccttgaggctgattctgtatccagtattacatataatgtttctaaggatactatagctgaggcggttaccaataacggtcaccgcaatataattaagcaaaattgcagattaagcgacgcagtgtcaggtatgtatgaatttatggcgtcagataaggacatagaaatatgcaaaaaagagtttaatcaaacgactatgctcaataattattataatgattgcagaaaatatgaggttgtttattgcattacgccgccggatgggaaagatagaattaaatattattcagcggatatcagtatggccgaagaccccaggtctaaggagatttacgcttttgtttatactcatgatgtaacagatgatatattaaaaaaggaagttattgagagcgcaattgaggaagaagtagactttatttcatacttaaatttgaaaactaatattgttaaaatgctgaattataaaaaagacgccgtagctcttccaggaactgaaccacgagattatacggaaagcaatatggtaaatatacccgctatgattccgccggaggaacaggaggaatgttttaaagccttcgacgttgaaaacataaaaaaagagcttataaacaaagatgagttttctataattcattcggtttacaatcagaggaatcctaatgaaaagagacgtgtgaaacataggatttattatctgaatgagcggtgtgatataatagtttttgtacgcagcgatataactgatgtttttaatcaggaacaggaaaaaaaccggcagcttcaagacgcacttagacaggcaaagcaagctaatgctgccaagagcgactttttatcaaggatgagccatgagataagaactccgatgaatgctgttttaagtttggcaagtttaggcgctgaggattctaaagatcctgaaatgactgagtattttaagaagataaatgattccgggaaatatctattgggactgattaatgatattttagatatgtctaggattgaacgtcaaaaagttaagctgaatcccgaaatagcagagctggataagtttttttctactattatgtctattataaaaccattatatcaagcaaagaatattgactttgtgtttgacaggtcagaatttaaaagaaaatatgcaaaaattgatgttatgcgtacacagcaaatattaataaatcttttaaacaacgctataaaattttctgataacggcggcaggatagaatttaccgcgttatctttgaatagaggcggtaaggaatataataagtttattatccgtgattacggcgtgggtatgagcaaagactttttgagccgtgtttttaatccgtttgaacaggaacaaaataaattttcttcgtctcaggaaggtactggattaggactggcgatatcgaaaaatttggtcagcctaatgggcggaaccatagaagttgcaagtgttataaatcaaggaagcacttttactgtggagataccggtttcagagccgggagcggaagaaataagagaatttattgatttaaagagagatttaaagaatacttgtgatttaagcggcagaagagttttgcttgcggaggatcatccgataaatacagagataaccgttaagcttttggaaaaacgcggaatggttgttgagcatgcagaagatggagtgattgctgtagatatgtttaaaaaatccaaaccgggttattatgacgctgttttgatggatataaggatgccgaatatggatgggcttgaagctgctgaaaaaattcggagtctaaacagaagcgacgcaaaaacagtgcctataattgctatgacggcaaacgcgtttgatactgatatagagaactcaattaatgcagggatgaatgcgcatttatcaaagccgataaaacctgaggaggtttataagacgcttgaaattttagtaggacgggtgtaacgttttaatgattttgagaaatgaattacattaataattataatatttattggttgcagaaaatattttttggaggttagtatggagaattccgatgtatttgatcctgcctggaaagatgaggagtatgattcagaaaatggtctgagtcctcagcaggtaagggagagagtggggaagggagcggtgaatgaatctgtggattcatctaccagaacatatggggagattgttaaaagtaacgtatttacttattttaatctgatatttgttattttggctctattgcttcttattgtaggctctttcaaggatatgacgtttttgggcgttatattttttaatacagtgataggaatagcccaggaatttcgctctaaaaaggcgcttgacagtttgaaaataataagcgacccgaaagccaccgtaataagaggcggtgtgcaggaaacgatacctgtagaaaatcttgttcttgatgatttagtgatattttcggcagggtgtcagataccggctgacgcggtggtggtctcgggaaacgttcaggttaatgaatctcttatcaccggagaatccgaggagatagcgaaaaaagccggagatgaactgctgtcgggcagttttgtggtttccggtgaatgcaggggaagacttctgaaagtcggaaaagaatcttatgtttctaagttgacgttaaaggcgacaaaagataagcgtgaggaagaatctgagcttattcgctctttggataagcttgttaagattgtaggcattataattattccgataggtctgactttgtttattcagcagatgttttttgcaggggcgacattcagcgacagtataaccggaatggtagccgccgtgataggtatgatacctgagggattatatcttttggcaagtgtagcaatggttgtaagcattatgcgccttgcgagaaaaaaagttttggttcgaaatatgaagtgtattgaaactttggcgagagttgacgttttgtgtgtggacaagacagggactataaccgagaatactatgaaagtcagccgcttggtgccggcagagggaaaggacttagattgtattactgcgcttttaagcaatatggtttccgctatgagcagcgataatattactatggaagccatgaaggaattttttacaaagactacaaaagctgaacctgaaaaagtgttttcgttttcttctcagtataagtacagcggatgtattttgggcggtcagaactatgttttgggtgcgcctgagtttgtgctcagagagcaatttgacaattatgccgaggaggtatacgaatattctgaggaaggctatagagttttagcgtttgttaaatatcttggagaaatgacaggcaaagccttaacggataatgttgagcttttgggttttgttctgctttcgaatccgatacgttcaactgcaaaggagacttttcagtatttcgctgaacaaggagttgatgtaaaagttatatccggtgataatccggtcacagtgtccagagttgcggaggaggccggaattaaggaagcggataagtatgttgatgcgactagtcttacaactgaccaggacatatatgacgcctgtcttaaatataacgtatttggacgtgttgttcccgagcagaagagacagtttgtgaaagcgctcaaagctcagggaaaaacggttggaatgacaggagacggagtcaatgatgttttggcgctcaaggaggcgaattgcagtatagcaatggcatccggaagtgaagcggcttctcaggtgtctcagcttgttttggtggattcggatttttctaaaatgccgtcagttgttggagagggaaggcgtgttgtaaacaacatagagagaacagccagtttgtttttggttaaaaatatattttcattgctgctttcattgttttcaatgattgcggtgaatggttaccccatggaaccatcgcaggtttcgctggtggcaatgtttacgattggaatacctgcgtttttcttatcactggaaccaaacaagagcttgataaaaggacggtttttaacgaatgtttttaccaaggctgctccggccggtataaccgactttttagtggtcagtgctttagtagtgttctgcagtatgtttaatatagatgaggaaagcgtttcaaccgcctgcacagtgcttatatccgttgttgggtttatgatactgtatcgtatttcaaaacctatgaactggcggcactggcttttgattatcgctatgatagcaggctggataggctgtgtaattttcttaagaccattgtttggtataacagcaatgagtgttcagtgcataatgttattggcagtgtttgcgctggttgccgacccggtgctgagatttttcagcttgattgttgataagtcgttttggcactcaaagatagataaagttctgagaattgtgcacagaagataaaacctaagaaataagcaaaatcagattttgttattacccggctaatgctgatgcattagccgggatttgttttatatatcaatattattgtctctatgctgtgctttttaaagcatataaattaataatgtaaatatatatacaaactgctcgttttaagcgaaatgtcttcattaggtatataattttattaataatattagcggataaaagttttattataattttacggttctgacggattatatccgtcataattgttttgtttctatattaattattattgtgctggttttgatgtatttggcatacatttaacaggaggtgcaatataaaatgttcaaagcaaattataaaccaaattctgctgccgatatatcaggcggcgaaaactatccggggataagagggcgcgtaatattcagacagcagaagaacggcgtgctggtcacggcagatatatatggtctgcctacgggagaaacaggatgtgattccggtgttttcggatttcatatacacgagggcgaagactgcggaagcaatggacaggaaccgttttcaaacactaagggacactataatccgggggattgtccgcatccgtaccatgcgggagatttgccgcctttatttgaaaatgacgggtatgcgtatatgtcatttttaaccaaccgttttactgcgaccgaaattattggcagaactgtggttatccatcttaagcctgatgactttcattcccagcccagtggaaactcaggggaaaaaatagcctgcggcgttataaaagcgttataggtatgtaaaatttatcgaaacataaatatttaggttttattatttaaaaagatatgttataataaaacgaaagaattaaaacataatcttttataatgttttatgaatataatttgctgccgctatacttacggttcggcggcagcattgggttaatcaatgaaaatataaaagaaaggggagtatgattaaatacgagtttagtcatatacataagctatgtattatcaaaataaaatttggatgggtaaaaatgaaaaccctatttttctgtttccgcagatggcaaatcgtcatggtttgattgccggagccaccggtacagggaaaacgattacattaaaggtgatggctgaatcttttagcgatgccggagtgcctgtttttctcgcagatataaaaggagacttatccggtatgagccagccgggagctgacagtgaaagaatgcaggggttaatagcaaagtttggattgagcgatgcgggttttaagtatcagtcatatcctacatattattgggatgtgttcgggaacaaaggtactccgatacgtactactgtttctgaaatgggaccgcttttgctgtccagagttttggggcttaatgatgtgcaggagggaattctgcatattatatttaagattgctgatgaccaaaaacttttattgttagatttgaaagatttaaagtctatggttcaatatattggagacaatgcgtcagattttaaaaatacctatggtaatataacgacagcaagtatcggcgctatacagcgcagtttaatcaaacttgaggaggagggaggaaactctcttttcggggaaccgggactggacgttaaggattggtttaaaactgacggcagcggcagaggatatattaatgtattaaattgcgaaaagctgtttttgcagcctgatttatactctgcgttcatgctctggatgctttcggacttgtatgagattcttccggaagccggagatatggacaagcctaaaatagtgtttttctttgacgaggcgcatcttttatttaaagacgccccaaaagaactgctggaaaaaatagagcaggtggtaaggctgatacgttctaagggcgttgggatattttttataacacaaaatccgatagatatacccgatacggtattatctcagctcggaaacagaatacagcacgctctcagagcctattctccaagcgagcagaaagcggttaaagctgctgcgcaaacgtttagaccaaatccgaagtttgatactgaacaggccgttaccgagtgcggaaccggcgaggctttaatatcatttcttgatgaaaaaggcgttccttctatggtggagcgagctaacattctgcctcctcaaagtttgatgggacctgttgacaataatattatggctcagatgatagcttccagtgatatgggtgcaaaatataatactgtaatagacagggaatcggcttatgaaatactttcagccaaagcggaaaagagtgaaattgctgaaaataaggcgcaggaagagaaaataaacaggcagcaggaagagacagaggctaaaatgaaagctgaagctataaaagaagccaaggctgagctaagagaagaaaaacagagagaaaagcgttataatgagattgaaaaggtggctaaaagtattttgacttccgcgggacgaaccgctgtaaattctttggttcgcggtcttttaggctcgctaaaaaaatagggggaattatgagcagatttactgatgagtataaaatcaaatatgaaggttgtttaaagcgcgtgcagaaaccggccagatatatcggaaacgaatttggaagcgtgcataagaaatggtcggatgatatgctgacttttgctttttgttttcctgatgtttatgaggttggaatgtctcatttgggaatgaagattctttatcatatgctgaatgagcgtgaggataccgtttgtgagcgtgtgtttgctccgtgggacgatatggagcaggagatgagaaaagagggaatacccctgctttcgatggaaagttatgttccggtgaaaaattttgattttataggatttacgcttcaatatgaaatgagctattctaatatagtgaatatgcttgacctcgcaggagtgccgctgcgcacggcagaaagaacagctggtgacccgtttgtgtgctgcggaggaccatgcgcgtatcatgcggagccgctttcggatttggttgatttttttatcctcggagagggtgaggaagttaacagcgagattatggatgtgtataaggaatggaaaaacagcggaagcacagaccgtgatgatttccttatgtcaataatacctttgggcggagtatatgtgccaaagttttatgacgtagaatataatgatgacaacactatctcaagatttgaacctaaccgtgaaggggtaccgaaacaggttagaaaacgtataatcctcaatatggataacacttatgttccaaaaaaacttatagtgccttttatggagaccgtgcatgacagaataatgctggagctgtttcggggatgtatacgagggtgccgtttttgtcaggcagggtatatataccgaccggtgcgcgaaagaagtgttgacaagctggttgagactgccggagagtgcataaaaaacactggatatgaagaaatgtcaatgtcatcgctcagcacaagcgattataccgatttggacgagcttacaaataagctgcttgatataactgtggacaagcgtatcaacctttcgcttccgtccctccgtgttgacaatttttctatggagcttatggagaaagttcaaaaggttaaaaagagcggattgacttttgctcctgaggcgggaacgcaaagacttagggatgttatcaataaaaatgttttggagagtgatttaatacgaacctccaatatagcgttcagaggcggatataacagaatcaagctgtattttatgctgggtctgcccactgaaacatatgaagatgtattagggattgccgagctgggcaaaaaagttattgacgagggcttcttctccataccggttgaggagagaaaaggcagaagcgtaagcgttacgattagtacctcattttttgttccgaagcctttcactccgttccaatgggaacctcagaataagatttccgaaatggaggaaaaggcaaaatatttaaaagaacatattggttcaaagaaaattgtttataactggcataacagtgatatcagtcttcttgaagccgtctttgccaaaggcgacaggcggctgggagaagttttgataactgcacagaaacttggctgcaagtttgacggctggagtgacttttttgattttgacaagtggatggaagcctttagaattaatggaattgaccctgagttttacgctttgcgccgcataggatatgatgaaattctgccatgggattacgctgatatcggagttccgaaatcattcttgataaaggagcataagagggcgtatgaggagaagacaactccaacctgccgcgaaaagtgcagcggctgcggagcagccagctttggaggaggtgtctgttttgagtaaaagacgtcttaaattttcgaagttaaacatggctaagtatatttcacatttggatttgctgagatgctttacacgttcaattatgagggcggaacttcctgtaaaatactcaaacgggtttaaccctcatcaaaagataacgttttcacttcctttgtcaataggtgtcacaagcgacagtgaattcgtggacattgattttgaagacggaataaaagacagtgaaataatggagcgactcaataataatctgccgcctgatatgcggatattaaatgtgggagacataaaagacagcgctaatgatttagtttccgcaaagtatcaggttaaaattatatcggataagttcatagccgatgaaaaagtcaaggaattttttgatatgccggaatatacgattatgaaaaagaccaaaaagaaaggcgaacagcctgtaaatttaatggattttataattgattacagtatttcggaacattcagaaagcagtgacagcagtatactgcaaatggaactaattttgtctgccggaggtcaaaaaaacttaaaacctgaaattgcggtaaaggcgttgtcggactatctagcgccggaaataaatataataagttatgatatacaccgaactgagatttacatcagtgaaaaaaagggtctaaaagtatttgagtaaatctgtgaattttggtgaaaatgatattaaatctgtttaacagaaatttggaggaataattatgagaagaattgggattcttacaagcggaggcgattgccaggggctgaattctgccattcgcgctgttggaaaagccttatatgagcgattccagaacgatgttgagatttatggaattcaggacggttattatggtctgatagagggcgagtataaaaaaatggaaccccgcgacttttcagggattctgacaattggaggaactattttagggacatcgcgtcagccgtttaagagaatgagggatgttgatgagaacaatgtagacaaggttcagaagatgaaagatacctatatgaaaatgggtttaaactgtcttgtcgtattgggcggaaacggaactcataagactgcgaatttactgagcgaggaaggtctaaatatcattggtcttccaaagacaatagataatgatatttggggaacagatatgacgttcggtttctatagtgcgcttaatgttataacggatgttatagacaggattcatactacagccacgtctcatggcagagtgtttatcgttgaggttatgggacacaaagtgggctggctgactctttatgccggtcttgccggaggagcggacgttattctgctgccggaaattccttatgatatagacagcgtggttgccgagcttaacaaaagagaaaaatccggcaagaagttttctattatagccgtggcggaaggtgctatttcaaaagaggaggccgctttgaaaaagaaagaacttaaacagagaagggctgagatggtacagccttcaattgcttatcgcgtggcggatgagataaaagaaaagtttaatcatgaaatccgcgtatgtgttcccgggcattttcaaagaggaggaagcccttgtccgtatgacagagtctttacaaccaggattggaaccagcgccgctcagctcatttccgaaaataaatatggctatatggtggctttgcagaataatgaaattgttccggttcctctgagcgaggttgccggaaaactgaaatgcgtcagccccggttccaacgaggttgtaacaggcaaagaactaggtatctgtttcggagattagacccttttatatttcacccattgacagccttatgctcttacttataagggcgtttaatagctgtccttccgttacggtttttgttatttttccattgtcatctatgacgtcaattatatgatatttatagcagcccagtttccgcaggaacagtcttgcgggaactgattcatgggctgccatccttgtaacctgacaaaattcggttcttttaagccgtgttttgtaatacaatatttctttcagtgatattaatgatatatttttttgttcaatactcaagtttcccagcagaaaagcgcctataagtatcagtgacagattgaagtcgttggtaaggagcagccatactgaaacaagcagcattccgattattggcactctgctgattttcagcattaagtttgaggctcgaacggctcctaaatttattgatataatagcttttgctatccgtccgccgtctaatggaagagccggcactaggttaagtatcataagagacaggtttatttttataccgtagtctatagcttcactgtatacagacagcattggatttttgtttagcatatagagcagtgctgccagtgcgccgctgaatgcaggtccggctgcggcgattacagcttctttgtatggatttttaatgaacccggcgcttaattttccgcatattccaaatggcagaatttcgattctgacgatagatacgccaagttttttcccgcaaaacacatgggacaattcatgcagaaaagcggagatatatgcaataaagaaaaggtttccgtagccgcctaagattgaagcggcggccagtaaaaaaaacagcggacttactgcaaggtaactgcctattggtataagccaaaggtgcgtttggagagcagaaaaaatgttttttaacttcttcaaaatatttcactccagaattgccatatttctgaaaaaaatccacatatgctgttccagagaccaataaagtcaaaattatatcttacagctcttccaagagcggatatacagtttcgtccaaactcgaatcccgacctgtttataagtataccgccgattattattaccgccacggcgatagattgttttaatattagtttcattcttaattcaaaacggtcattctttatattgttcttgcggtttggctcggaaaaagaacctcttctcctcagttcttctctcatactatatttataatataaccgtgcggttatattatttcctcctttccgtttgagtatatataagtatattgaattgaggagacaagtatgaccttttaaattggatttatttttagggtatcgtaatgagattatcttatatttaaatatttaattcatatatataagaaaagacatgcgttttaggtgaacttaatggttttccaaaagttagaaccaaatatctgacaattggtgatcgcatcaaacacatgtcttttttttacatcctgattataggaattttttgcggtatttttatttattgagtgtttataacggcggcaatttctaaatcatgtattctttttgccggaccgtaaactgctgcaaaggatgataacagaaccacaaatataattataaacagtgctgataacggtatttgccaagtatctccccaatgttgcgtaacaagaaagctgaacataaatttatgaattggaagccccaggacgcttcccagaatgctgcctgttacggcataagtgactgcttctgctgttatcattttgactgtttgtcttttttccattcctattgctatcatagaggcgtattgtttaatctttgaggatacgctcatagagatactgtttattatgttgaatacggtaattagagcgatgattaatatgaacccgtatataaataaggcaaatgccaaaaatgcccccctgacttccttattgcttaggcggcggtcagaaaatgttatatcagaaccggctaaaccgcgaatatagtttacatcagcatcagtcgcttgatttgtgagctgaatatcaattatagtataattcttttcaccggttattcttttaaaagtttcttctgaacagataattgtctcagttccttgttcactttcaaaagggcaggtagaaagaactccggatattgaaactgtttcgtttcctaggtttattttatctcctgtatgcaaagaattttcattactgtatacagcaagcacataatcactattgccgagaacctttgataaatccccttctaatatataattttttttatcagcccaattaaattgattggattcgtaggatattaaatctatttttctgtcgcttccgtttatttttacgggcatattatatttaaatgaacgtccataaactcgcttaacgctacgcaaaccggatagttcagcggttaggtctctgtttacggaacatgtgttatccggacttataattgatacgtcaggtgtatatggcttaagcggttttatagcatgattcataaaactcacaacagctgagaaagcaagaaataaaacaatgcttaatgcaaaggaacctgtcattagaataaaattttttatattcattttagcgtgatatataccaagcccggtgtctactttaaataagtttgtgccggcagcacggtatacatttttagtattgttataactgcctgttattgctgaaagcggcgatacttttgcagctttttttgccggtgactgagcggaaatcaaaacggtgaggagaccgacagctattcctgatataattcccaaataacttattccgaaaacaggcatatcttcaaaataactgccgcttaaaaattttaacaaggaacaaagaacccatacaactaaaactcccaggataactccgattggtattgcagctttgcaccagtttaaggcttcaaggcgcacaaagcgtattatttgctttttttcggcgccaatacaccttaacatcccgaaaaatttcgtccgctgtgatatattactgtttaaactgcttgctatcattaaaactccggcaatcagcaccaacaaaaacaatacaaaagctgagccataaagacctagcatatatgaatcattgctgtatcccatagtacctaaaagagcggtattgcgagaaatattatcttcggtgaatccatattgtttctttatatcttcgattgctctgcgaatgtttacgtttttgtcaaattggacgtaatatatcatatctgaatcgagtagttctttattttcagcagagctataaatatttttaaaagcaggcattggcagaaaggcgccgattgcgtcagcttgtgaaatcatagaactgtccatgccgaacccggaaataatataatttattctctcgcctgaaggtagattaatctcgatagtatcgcctatagatacttttagtatatccttagcattttgggtcagaatgatctgattatcatcggttggatattgtccttcttctatagagtcaggcattatatcattgagcagcgattgttctgttccgcatatcaccgcgtctttaccgttaataaaatatccgtcttttaaacggtaatttaaagtattataccaagaagccgcagcaatatccgatcgtgcagaaagtatcccggcatctttttctgatatgtttttcaatgctatatgccagtttccatagtctttgattgcttttattttctggcttctaatttccatatcagccatgctgaatatggcggttacaagaaaaactgcgagtatgatacataccatagtcattttattttgttttttattgatcttggctgaaatagggataaggctaagataacttttcattattagcacctcccaaatcagtgagaacgccgtcggctacatggaatactctgtctgcagatgaagtaagacttacattgtgagtaatcattaaaatggtctgtctgaatattttagaagctcttgttaaaagttctataacgtcggaactgttttgactgtcaaggtttccggttggttcgtcagccaaaatcaacatgggtcttgttatcatggctcgccctattgcgactctttgctgttgaccgccggataattggctgggcagatgcttacgtctgttcgaaagcccaagcacgttaagaatttcgtcaacgtcttttttgtccggttttttatagtccagtaatagaggaaagataatattttgctcaacgtttaactcgggaataagctgaaaagactgaaaaacaaaaccgatgtttcttctcctgaaaatagttcttttttgctctttcattttaaatatgtcatcgttgtttatatatatttttcccgatgttggcgtttcaagaccgcctatgcaatttaatagggtgctttttcctgaaccggattctccgacaactgctgcaaattcccctttgttcatggtgaatgagacattttttaacgcatctacacgtgtctctccgtttccataggttttactcagattttgtacttttaagatttccataagttaaatacctccttttactgagaatacaaagcgcggcttactatagcgtgaattttatcttacagttttgtaagatatactatttaaagaaggtcaatgtaaaagttgttccggcatttaactcgctttttactgtgatgtttccgccttgtccctcaataattgaattagcgagaggaagaccgagacctattccggaggtattattgttttgggttggtacgattcccctataaaaccgtttaaatatataatggatatcttctgtagaaatcccggagccatcgtcggaaataaaaatttgagtaaatattggggagtttttccactcaatttttatatgtccgcctgcgtcggtgtgatccaaggcgttttttactatattgctcaacgcttctgccgtccactgtctatcacaaaatattttatcttttacagagccgtttattgaaatttctttgttctcatgttttgccctggttgtcaattcgtttattgactgataaacaatttcgtttaatgtatattcagatttattaaattcaatactgccggaatcaaaacgggcaatttttaaaagtgaagatataagctgttcaattcgtataatggaagaggatgatttttcagtaaaaattttaacggtctcagtgttatacggttcgtccaatactatttcattatacatctttagtgcggcaagcggcgttttaagctgatgtgatatatcagaaatcatattttttaaaaattcttttgttttatgttcagcctcctgtttggattttagagcagcagccatatcgttaatggaattgaatagatgataaatggttccgttttttagttgagggagttttgaagaaaaatctccttttgtgtagcaggtaacggtttgtattgctcttttataaatttggtctcttttatataaaaaaataataattaatatagccaacaaaagaaaaaatacagatgttatcagaaatataaatgtttttgatttgacctgaaagtctgaaataaaaggtaaaaatcttgagtcagttttttcggttattccgagtttatttaaaagctcataactttgaggactttttgttgtgtttgtcaaagattcagctattatcttttcagaaacaccattttccaataacgcagccgtgatagattggtcgtgggatacaaaaatcttttgaatgatgtctttttggtatatgcacaaaatagtttcgagcacaaacaaaaataagataattaacacaacagaaacacaaaagttccgggtttctttttcataaaaaatactcataaccccacctcgttccatttgtagccgaatcctctgacagtaagtaaatgctgtggttttgacggatcattttcaatttttttgcgcagtctgtggatatataccgaaagggtgttatcgtcaacaaatttttcatcacagtcccacagctcgtttaatatcatatttctggttacaactatattagcgtttcgtattagaattagcaggagtttatattctgcgccggtcaattcaagagtttttccgtttaaaattatagtatgttttaataagtcagctgttacatctccgcatttaactgaagtttcattatatttttgtgctgttataccggttctgcgcaatagtgcatttattcttgaaaacagttcggccagtttaaaaggctttgtaatataatcgtcagctccgctgtcgagaccccgaattacattgacctcctcgtcagaagcagtgagaaagatgatggggactgtattcccggtgtttctgacaaaatcacatatttcaaaacctgtgccgtcgggaagagtaacatcaagaagaagcaagtcgtatttttcagtttttaaaaatatcttagcttccttaacagtaccaacaaaatcagcagaaaaaccatttttacttaacgaatatttcaatccgtctataaggctcgcatcgtcttccagtagtaaaattttcttcatttttattctccgttctgtaatatataaaaattatatagaggattatttgcactgtcaagcggcctacggaatgtttatagaaaatttatattattaattctatctgacctgtgcactttagtgaaattctaaatgcacagcttaatagaaatatgttataaaaagcttactaaaaattaagtcatttctaaacacagaagagtttgtgtaaacttataaataatttttaaaatatgtcgtattgtgatacatagaatggaataacagtttaaattctgtgccgttaaaatttaatctgtatgattattctagttagcaaacactaactatgttttgccttttatttttaacaaaattatgcaaatagccaaaaaacacttttttattagaatttgcttgacagatttatggagcgatgatatactttttatagaggttagcgcgagctaactatattttataccgtatggttagtattagctaactaatatcaatttaaatataataaaaataagatattttttgaaaggaggggaaccatgatgcctttatctatggctgtgattggtgaaaagaagagggttataaaagtaggaggtaaggatgaagtcagaaggtttcttcaaaatttaggatttgttgaaggggttgaaataactgtcgtttctgagttatcaggcaatatgattatcaatgttaaagataccaggatagctattgataaatcaatggcaaacagaatcatggtttaaaaattaaaaggagatgttaaaatgagaacgttaagagacgcgaaagttggggagactgtcagaatttcaaagctccgcggagaaggtgcagttaagagaagaattatggacatgggtataactaaaggaactgatgtttttgtccgcaaactggctccgctgggggatccggttgaaatttcggttaggggctacgagctttctatcagaaagtcagacgccgaaatgattgaagtaaactaaaattatttggttgcagccggttcatacggctgtaatataggaggtaaatgcagatgtcaataaaaattgcgcttgccggaaatcctaattccgggaaaacaacaatgttcaatgcccttacgggtgcgaaccagtttgtgggaaactggccgggagtaactgttgagaaaaaagagggaaagctaaaaggtcataaagacgtaggtattatggatttgcctggaatatattcactttctccgtatactcttgaagaggtggtagctagaaactatttgattaatgataatcctgatgtgattttgaatatcgtagacggcagtaatattgagcgtaatttatatttgacaactcagcttattgaacttggaattcctgttgttgtcgctgttaacatgatggacgtagttgaaaagagcggtgatacaatagatttcggtaagctgggaaaagagctgggatgcgaagtagttccggtttcggctttgaaaggaaatggagtaaaggaagccgcggagaaagctgtaaagacagcgaaaagaaacagaggcgttaagatattacatagttttgacaaccgtcttgaagagtggctgtcagaaatcgaaaaaagaattggtataaatgttcctgatgaacaaaagagattctatgctataaagctttttgagggtgacgataaaattagggacttaattaagatagttcctgatgtttccgatatagtgtctcaagccgaaaaggaatttgatgatgatgctgaaagtattatcacagacgctagatacaagtacatatcgtcaattattggcggatgttataagaaaaataagaagaaaaagcttacagcttctgataaaatagacagagtggtaacaaaccgctggctggcactgccgattttcgctgtggttatgctgatagtgtattatgtgtcggtaaccactgtaggtgcttgggccactgactgggcaaatgacggtgtgttcggcgaaggctggaatctatttggcatttgggttccgggaataccggttttgttggaaaacctgctgaatgcaataggtaccgctgattggataaacagtcttatccttgaaggtatagttgccggagtcggagctgttcttggatttgtgcctcagatgcttgtattgtttatattccttgcgtttttagaaggctgcggatatatggcaagaattgcatttattatggatagaatttttagaaagtttggtttgtcaggcaaatcgtttatacctatgctgataggaagcggttgtggtgttccgggtattatggcctcacgaactatcgagaatgatcgcgacaggaagatgactataatgactaccacatttataccctgcggagctaagctgccgattatagcattgatagcaggagctctgttcggcggggcatggtgggttgcaccaagcgcctattttgttggtatagcggctattgtggtttcaggtattatccttaaaaagacaaagatgttttccggggatccggctccgtttgttatggagctgccgcagtatcatctgcctacagtgacaaatgttttaagaagtatgtgggaacgcggctggtcgtttataaagaaagccggaacaataatattgctgtcaaccatagttctatggttccttcagggctttggatttgaggatggaagctttggaatggtagaagacttaaataactcagtgcttgcaaagataggcggagttatcgccccaatatttgcgcctcttggatggggtgactggaaagccgctgttgccgctgttacaggtttgattgcgaaagagaatgttgtcggaacttttggagttttatatgggtttggcgaagttgcggaagacggagcagagatttggggttccttagctgcaagctataccgcgatagcagcttactctttcttagtgtttaatttgctttgcgcgccgtgttttgcagcaataggagctattaagcgcgagatgaacagcgctaaatggacttggtttgcaatcggataccagacggtatttgcttatactgcagcccttgcaatttatcaaatcggaaacttgttcacgggcggagagtttggtgtgtggacggtggcagctctattgattattgcagcattcatatatctgctgttgagacccggaaaagaatcaaataccataaaggttaacagaaaagttatgagagtttagaggtgattttatgatttcaacaataatagtttcaattattcttttggccattgtgtctgcaatagtaatacacttggtcaggaagaaaaaacgcggcaaaggttcttgcggatgtggatgcgacagctgcggaatgtcaaaatattgtcataaggattgaatttaacgtttagaggagttgtgttattttttaaaggggaatgaaaaaataaaattcttctgttcagatttttgtttgttcatattatgtgaaatttagccattttgcaaagagtaaagataaaaagaacatgttttatttgtgattgatcattacatgaaatgtgttcttttttatttgtctaagagctttatagtaaataggtatatggatatggcataaaataatgtagattttttaagaaaaaaagaacgaaaaatggaggatagacataatatggaaaggagggggtagtaatatgtcaacactttgtaatgtatgtaatcgtcgtcaagcacgctgtccaaactgccattgctgtaaagcatgctgtcagtgcggcaattatccgtgcaaccagcctgaagatgtttcgtttactatttatgtccgtaattgtgtaaccggcgaaccaatatccggggcgtcttatgcaatatgcaagaatggaaaagtaattgaaaccgtaacatcaggtacagatggttcgctgaatttttcgtcaattatgccggggtgctaccaattggctgaagtatcagcagctgacggataccagttggatgacaaggttcatcagataatagttgaaccaaacggaaaggtaataatagacggaaagagttcagaatgcggtgagttatgtaataatccgcttatatcattatcttttttaaaagttaattccgtaacaggtttgccagtacagggcgccgtatttacgttgtctgatggtcagaaagcggtatccagtattaatggcacagttagatttaacaatctgtctccgggaaaatacaccttggttgaaagcagcgtcccgggtggatacgtgccgaatacacggatttattatgtcgaagtatctaattgtggtaaaataacaatcaatggaattcctatgggtgaatttaaaatagaaaatcagccgtctgaaggactgacttttaaaaagactgaccaaaacggcacattaggacttgcaggggcagaatttagactttcaaatggcgcaagagcggtttcgaattataatggcaatgtagactttggcacacttgttccgggaatatataccatgagagaaacaatagcgcctgacggttataagctggataataagatgtatgatgttattgtgtctaataatggttcaataacagttaatgggctcccgattcagaattttaaggtttataatactcgggaggagcgtagtcagcgtccggtcattacgtctgtaagtgaatgttacaggggtgtaaacggcaccggtgttccgggggctgaaataacagtgacattttctgacggaactcaagtttatacggcagttgatgtttgcggaaactggagtgtaaatgttccggttaatgtgacaattactaaaggagacgcaatattggcaaaacaaaccgaacccggattgccgccgagtgaaaacgcattttttctgattcaataaaatgcaggctgagaaaataagttaaagtttttaaaccacagcttttagctgtggtttacatattataaatattaatcgggaaaataaaattttttatagtatcttatttttaatgaaatgattttttgcattcatataatggactaatttttgccttttatatattttgaatatattttatcaaattaagtgaatatatttcgttatctaaaagcgtttttctgaaatgtgttacctgttaaaatatggcaaattctgataaaattattctatattttgtcaggagtgaatttaatgaacaatattgaaatggaaaagatagttaaatcaacatttggcgggcttttatatgaaataaggtcagaatatgaaataagtcaggaggttatggctgagatatgcagaatctcctgcaggcagtatgcaaatttagaaaatggaagatgtgttccaacagtattaaattttattaatatattaaaaatatttgatgtcaaaatagatgattttgtagataaattaatagctaacggctatgtagttccggatatggatccaaacagagaaatggatattgtaaacatttaaggttgactaaggatgcgaagtaagtgtatttagaaagtttagattcaaagtttcatttaaaatacatcaatgtttttgatatttatagaattatgtatcataatatacactcgaaaaataagaatgtgtgccggcggggacagtctgcggtatgatatatagatatacatatgaaaaagaaagctaccatcatatagacattggcagttacacgtcgtatgcagtaaaggtttataaagacagcaaatgtgttgaatacctaccggatttatttgatgaggcaaaaaaagctcttagatttaccaggttgtgcgaggctctttatatggaaccgaaatatatctatgattttttagatattatcataaaataagcagtgtatataaaaacagcaggtcagtaatatgctgtcctgctgttgaggtatgtaaaattatttttaaaaattagatacagttagtaatttattatgaattttatgatgtaagaattcagtaaatgtattattgaagccgtaatattgtttctatttgcttttaataaataagttttttataatatgaaatttgttttatatcttaaataaaaacttatatagtgatttgtaattaaaatcactatttttatctgccttatcttaatattacaacaaaatgttttgaaaattattatctgcaaattcacttgatttgtttaattccgctgaaaacagcctgtcatcgggaagaaagcccaatttcttgatattagagggttctaataattcttgaggggtgtatatttgtattttaaatccaaaagattcaaaatgttttaaaacatcattgccgtaaagccggcaatggtcgtcttgaccaaaggctttaattctggaagcggaggaagtgattgttttatcctcaaaagtttttctgtctttcgcaataggaatagaaaacaaaaattttccgtccggttttaatactcgttttatttctgagagcgcagcattttcgtcagaaatatgttccaaaacatgattaataatcacgtagtcaaatgtattacttccagctgtaagatttgttatatccataatatagtctgcgcgccctttagctaaatcaccggttatgtaagtacaattcggatttatcttttttatcttttgggctatttgcggttcaggagctatatgcagaactttacattcagttgataaaatgtctgtaaaattcacgataacataccacgtccaccgatatctgtctaaagacttacaatgaggacacttacagttttttctccatccgccgccgataatatttatcttttgaaatatatcctcattttgaccgcaaggtaaaaaatagagagattttttgccgcaaattatacagcgtctcctgccaaatggcagagcggccaaaaattgagttaacttatatttaattttatgagcgagggtaaacataatgaccactcctttatttacatttcaatataattataacatattttttataaaaattaaatataagattttataatactctataattctactaaaatattaatatattaaaccattatgttaaaaaccaaaccatttaattattacacaaaagaatgggtatgtagtgaacatcggaagggcgcatttatgcgcctcgttaggtgagctatcatctgaacacgcagtgttcaatatatcaagtaaatattcataaaaattaactttatatatgaccccatataaaaaattttattattacataatagggtgtttgaaccatttctttttatttgagtattcataataatgacattgcaggttatagcaaaatatgaccatatgtataacacacactttctttgaaagtgtggtcacactcgcaagaaaaagaaacgtttcacctgtgaccacacctgcaaggtgtgtgtaatacaaagttacttgttttgaataatctacaatgtcaataatatgtatactcaaaaaaagaaaaagtgttgctcgcttaggtcgcctgcggctccaaggggcgctcgcctcccgctcatttcaccatgaagcatggcttcatgatgaaaaaagccctgtaacttcccgttgactttgtgtgctaccgtgaaaatagatatttcgagttcttatttatttcatctgataaaaactgttgtttttgcaaacatcggcagggcgcatttatgcgactcgttaggtgcgcagtcgcggatttgttaatatcttttattattatctttataactttctataagattaattatcagttctgtatccttttcattaagtttatttattccttctattattttatgtattttttcagggtaccttatattttcattaaaaaattcgtatggcgttattcccaaatatctacatatttcaaaaaattcgctcatggatggcattgcttttcctgatgttatatgatttatatatccttgtgaacgtcccatatctaaactcatacatctttctgatacattttttctcattctcaattctgttattctttctcttatataatcctcaaacatttcgttttctccctatttacttttaaattaattatattatatttgatttttttatttgttgccatggaatggcatgtagaatataagtcatgtcatgtggaatttaatataagtaatggagtgtcgcaaatgattattgatgtaacgggaatagttttaacccccggaaacttagggaaagattgtttagggaatggaaaatatttttataaaggcggaaatcctgtgccgtgctgttgtaacgaatgcgattttttactctgttgtattgataaaaattataaagataaatgcttaaaatgtaattatactcaatgccctcgttattttgcgtttcaaaataacgattttgcaacaaatcaagacttggataaactgataagattgttctttaatttagaacctgtcttacaaaataatatgatatatttaattaatgatattttaggaatacaaaaacaatttaaagatgaaaataaaaataataagtttatatagtatattgaacactgcgtgttcagatgatagctcacctaacgaggcggttatgccgcgtttgagtattcatattattgacgtaaaagctatagtaaaataagtcactttgtatcacacccaccaaaggtggggtcacacctaccgatgttcacggaaaattcagttttttgtgtaataattaaatggttcaaacaccatttttatgtaataataaaaattatatgggttcacatacaaagcatatagatagttttttcaaaaagtaaaataataaaaattatatggagccacatacaaagtatatagatagttttctgagtaaacaaataagccgtatattaattataaaaaaataatcctgtctaaaacggacagagattattttttatttgcccaggctttgtcaagccgggttatcgcctgctctatttcagcttccgataattgaccgtatccaattacaaatgtgcttgacggaagtttggggtttggctttatcagaaaggttgtaagaggtaaaagttttacccccattttagcagccgatatttttagttcgttctcagtcattccgttatcaacggaaactataatatgagttccgccgctttggtgatgtatagtaacgtattttgaaaatgaacacgagttgattttgtctttaagatatttcgatttagacaaatatatattatatagcttctcgagatgacgctggtattttccgctttgtatatattgggcgacaacctgctgttcaattcttgatttaagagttgtgtagtatggcatacgttcatcaaaacgttcttttagttttttgggcagtaccaggaaccccgtttttattgacggggctattgacctgtaaaacgagttcagtaaaataaccttttcggaagtatctcttagaaacagcgggtcgagaccgcctctgtcggaaaagtctaagtcaaaatcggcttctattatatagcggtcaggtttttcgtttgcccagtctaaaatttctttttgctgtgccgctgtcatacgataacccgttggaaattgcccgtcgggcgagatgtataatacgtctatatcgcttttatataagtcctctacatcaaatccagctaaacctacgttaatcagagtagtttgttttccggaatttttgaccggtacataacttcgcgcgtagcacggattttcaaatccaaatactgtgctgctgccaaatatgtgtgatagctgttcaatcaaatagtcgctgccggcgccgattataatttggtctgttgagcatgatattccatgaacttcatataaatagtgcgccactgcttttctgagtgatttttctccatatttatgaccgtattcaaatagctccggcttgtcgtaaattatttcacgatatagttttaccagagtgtttttggggatagacggcaaatctataccattttggctcatgttaaaactgattccatgcaggtcataaaaatccggctcaaagatgtcagtgtttatagggctttgtcttctcgcaaaatatccgcttctgggctgtgagatagcataaccgttatcaattagtttttgataggccaaatccacggtattttttccaaggcctaaaacttcagtcaatctgcggcgggagggaagacgttcgttatccaaaattctgccggatactatatcgttcttaaacgcgttataaagctgaagatacagtggagtgctaagcgttttgtcaattttgtattttacgtctttcattctctcaccttctttgcttgaattgagttaagatattatgtctatttttacttttttattgtataattataccactttatttttttacagtcaacgcggatatttttctatatacaaactggacctataaaaattttttcatctggacctgttaaatcaaaaattgttgatttataataagtataagtaagcaataaataattggtgttttatattatgactgctgattatttctttgtttatagctgtattaattagtatttaatttaaaaaattaaataaattgatttcttcccaaaaggccgcgtaactgcggcttttaatcttttataaatgggtttagtttaatttgacaataaaatgggatagtgataatatattgttattatgaaagagaaatcaaatcctaaaatttttaagaatattattttctatgcccgcagatattttccgtgggctttggttgccgtgcttgcaactgtttctttttcattccttgaggtaatgaaggcaaatatattaagagcaattgtggatttagctcagagcgggaatgtgaacggcatattgcctgagttcttaaaagccgttttaataattatttgtgttatggtttgtattttcctgagcagatatgcggccggacgtttttcttccagcgtgatgcgtgatgttaagagagacagcgcaagacatatttcgcaaattcctttaagttatatgaactctaacaggagcggagagcttctttcaaaaatgagtacggacgccgattcggttcagagctttatggagggggacttcatacagcttattcagcttccttttactattgtgttttatgctatttatcttatttggctgaatccgatattgtttttagcgtgttttgcaactcttccgattttgattcccctcggagccagttttgctataccgtttagagttggttcaaaaaaatacatgaagtatttgggtaaggtgagcaacactgttgccgatatggtcggaggaatttcagttgttaagtcttataatatggagagagctcttgctgataaataccagtcgggtatagagcgagcaaccaatatggcgcttaaaaatgacaagtgtcagtataaaggttcgtttatttttaatttggcgcgcaatataccaacattgacctgcctggttttcggaggttatttgtgcttcaagggcagtttgactttgggcgcactgatagcgttttcgtcactgctcggtcagacgctgagcccgcttatgcgcgcttcttctatgttttttaatcttaaatccgcgtccgcttcagcggagagagttttttcaattataaatgaaccctctgaacaggagggcagcgaagtttctgcttcgcttaacggagacgttccggctatacaatttgaaaatgtaagttttggctacgaagaagataagcccgtattaaaaaaccttaatttatcaattaaaaagggtgagactgtgggattcgccggagccagcggatgcggcaagagcacaattcttggactgatttgcggtttttaccggccttcatcgggaagaattctaatcggcggaatagatatgggcgacagaaatttaaaggctgtcaggtctttgatttcatatgtgtctcaggacgcatacctttttccgttttctatatatgataatattgctatgggaaaatcaggagcaaccaaagaagaagtgatagccgccgcaaaggctgcatatgctcatgactttattatggagaccgaaaatggctatgatactatagtgggtgagcgcggctccagactttcgggagggcagatacagagaatttcgattgctagagcaatgcttaaagacgcgcctatacttctgcttgatgaagccacttcggcgcttgatgtaaaggcggaggcggaggtgcagaaggcattggataatttaagcatcggaagaactgttttagttgtggcacatagactgtctaccattaagggggctgacaggattgcagtgatagataatgggatagtggctgaatgcggcagtcatgatgaactgctgaaaaaagacggcttgtatgcaaagcttcaaaacgtgcatagccagcagggaggtgaagctctgtgaaagttttagacggattaaagagctgtttttctctgatgggaaaacacaagtatgcgtattggataactttgatattggatatatctttaggttattgtgcagacgtaatgctggccttgcttaataaaggtgtaattaattctgtgacaagtctgaattacgccgcttttatttcttctatatggctgggagttgctgcggttatcgtttatttgataaacgttttggaccggtattttaatatgcgttctattaggtatataatgcttgatttaagacatgatttgttcagacatatggaatttttatcggttggatattttgaacaaaatcacagtgctgacagtatattcaggctaaacagcaatgtcgaaaacatgaaaagagcatataccaaccattgtcctaacatatttcagggtattatcggcgggcttggctcgtgtgtttttattctgattatggatgtccgccttggacttatttcattagctgcctgcggacttacagttctgataaacattaagtttgccgagccgctaagaaaaatcggaggcaaaattcagcgttctgaatctgctcttttaagcaggctgtctgatttggtggcaggattcagggttattaagctctatgatacagacggatttattataaataaatatgaggagaccaaccggaaaactgccgggcttagaataaaaaggattgccagagtcggcacgatagacagcataagtcatcttcttaattttataaacacttttgttattattactatcggagctgttatggcggctaaaggctacacagattttggaacagtgtttgctattttgaccgtgcagggaaatgtaagcagtatgcttttgaattttggaagcgcttgggggatgatgcaggagagcgttgccgcgtctgagcttattcatgaggttttgaatactgacaaagaagagcgcaagccggctatagccccggaagacgatacgagcgaccattacatagcgtttgaaaacgttacgttttcttatgatgacagcggtcctgttcttgacggacttaatctgagtgtaaaggaaggcaccgtagccgcgcttgtaggacccagcggaggagggaagagcactgttattaaacttctgccggagttttatcctattggtaaaggaaagatatattttgccggcagaaacatagattcttattccgcggatgaattgagaaatatgatatcatatgttccgcaggacgcgtatttgtttgacgccagcgtaaaagaaaatataggctatggtaaaacaaatgcgtctgatgaagagattatagacgctgctaaggcggcaaatgcccatgattttattatggaactcagtgacggttatgatactcttgtcggtgaacgcggtgaatctctttcaggcggacagaggcagaggatagcgattgccagagcgtttttaaagaatgccccggtgctgctgctggatgaggcaacctctgctttggacaatgaaaacgaagcgatagtgcagcaaagtatagaaagcctgatgaagaacagaacggttattgtcgttgcccacaggctgtctacaatagaaaatgcggatataatttatgttattgagtatggcagagtagtgcagctgggaacacatgaggacttaaaacagcaggacggagtttatgcggagttagtaaaactgagcaatgcgtttaaataatcgaattatcttaatataaacattggcggccaatttccggccgctttttttatagcatttatttaaactggtatttaaaattataaaaataatttaattacaaatataaatgatttgagttatcaaagtttatatgtttaattatactattaaaaagttatgttaatataattaattaaatttttataataaaaacgtttcgaaaacaaaataataataatttatactgtgaatttggttttgacatatttgcatatttatggcaatatttatgttttgtggcaataaaactgtaacgcgtgttgttatgttgcaaactggtatttaaaaatatttgttaactggctattgatattgatttccggtttgatataataatatcataaaatataaattatagttttgaagggagaaacggaatgaaacaaagatggtgggtaagtttggttgtgtcagtagtgatgcttttgacaatgatgccaggaatcacagtgttatctgcaaatcagacagatgaacaggtgaatacggcggcgtctgagaaatataaaatatctgattttgatttgggaaatgcaaatgtaaaatctgctgatataaatggttattataacgcaaacgcggatgtttcggcggagtatgtatatcctacatctgacccgaatggatatatatatgatatattatcggcatattttggaaatgatggaaaactgaatgtagtgttaagatataatggaaatgaagcgaatccaacaggaaagttgttcgttggtacatatgacgaggcggacagcgaaataatgctggacgcaaagagttatgatataaagggaacgacggttgaaggtcttgattatatcaagcctggaaaaggaaccgttagactatatatttgggacggtgttgattccttgaaccctctatccggagtattaaagccgggggatactcctccgccgacttttgctccgacctcaacaccggaaccgacagcaaaacctactgctgtaccgacagcaacaccaacagccgcgcctacagcaactccaaccatggttccatacgataaaaaggcggcagttatgcaaaataatactgttgtcggtgagtatgatacaataaggggagcagttgctagggctaaggaaattaatcctaagtcggaagcagaaagggttacaattaacgtaaaccctggggattatgaagaacaggttaagtttgacggcgttaattatgtaacgctgcagcaaatgccggaaacaactgggaaggtaacacttcactggtattactgcacaggatactgcgcttcaaactgtgaccttgcaggaaattataatcctgatattgactggtcgcttgatgaaacctggaacggttataaagccggagacgaaaagtttacaaagtatgagataggtgaagttattacaggtaagactatttcatattatgataaaaatggtgtggctcataaaaatgttaaaccaaatgcaaacaatcttggttctaccagaacatatgaccaaatgggtgttcttattgtaaactctaatgcaagcaatattattgtaaaagatttgaatgttgtaaacagtgttcctgttatggtgacgcagggtgagaaggatgctcatttgacgccgcagcttgacagaattgcaggtgttgcaacaagctatgttctcccatatcgtgataatcttgcaatatgtgatgagaacactcctgaagacgctacaacaagagttaaaaatgctcttgccataaaagatgagaatggaaatgcttcaaagagaatacaggctcttcagaatttgactaatttaacagcgggcgagagcgcatatttagcaaagtctgcttcatataatgagcgcggtcacgctcttgcgctccacggtgataaggttatattagagaatgttcgcgcaagaggaaatcaggattcagtatatattacaaatggaagaatgtatttcaaaaactgcgatttgataggcggaacagactatatttacggagacgcaacagctgtgtttgataactgtaagctgggcgctgagggtatgtcaaatgcaacgtcgggggcaacaataacggccgctaacaccagggctgaaaacccttacggttatctcttctggaactgtgagatttataacatgcgttccaatacaacctcaaattcaaattatggaagaccatggaacgattttcctcaggttacttattataatacaactcttgatgactcggcttcaacgggcaagagtaaagtaactatcagtgctgacggatggaatgatatgacaataaagaaagaccaggcacgtttctttgaatatggaactaaaaataagagcggaaaaaccatagacctttcaaagcgtgttaaaaatgcggcagacaaagcagggatgggtacagtccttaatgactggcagattcttgaattcaatccaagaaattattttaccaacagttttagaagcgacgcgtgggatccgatgaattttagtgagaacttaaagaacgttgacgctgcaatagccggagcaacagttgtaattcctgagaatgaggaaacaacaattactcttccgacggctccaaccggagtttcatttaaatgggaatcatcgtctgaaaatgccactgtaagcagtgacggaactaagctgactgttgtccgtcctgctgcaggcgaaaatagtattgagtccagcgttgtgctatatgcaagggataataacaatggttatggcgataagaagacaatacctgttataattacacctactactaacacaaaagatgtatacaccgtttccggtaatattgaactttctcaagcatcagaaagtgatgttacggtaacaatcaagtttatgagcggagcggcacaaataaagaaggttgatgtaattgttccggcaggtgcaaaaactcaggcttatacagtcgaaaacctaccggtaggaacatatactgcgtatatgtctataggtgatcctttatacaacatagcaacagaatctcagaaagtcgatggtactataggaagcactgtttcattaaatattgatgctaaaaaaatgcaggagataattgtcagcagccctgattttgatggcaaaggctatattccgacaattaactcagcgtcaggcttcagtggcggtatttataccgttaccggaaaggaatcagctaatttaggcgaggccggcaataaggttctgaaacttactaagaatgaaggaagtaaagttgctgcaaaaaccggtgcaagctttaacctgacttcaatgcttccgagcggttcatcactggcaaatactaagacaatcaaattcagctatgatttcttaatggaaagcacagattatttcccgaataaccaatcaggttttgaccttgcaacaagcacaaagaacggcggcgacggaagagccgaagatcagaccagatttgttcgctggggagtttataaaggctggagccagtttaatatatacacagcaaataatactagaataaacggagataatactcagtttaacagaggaaacaatatggctaacaagtggtacagaattgttgcagacattgaccttgaaaatcaaattataaccacaacgttgtatgacagagattggaaaatgggtgacgcaggttcatatatcttaaataaaaaaccttttgtggttgcggctaaggacgctgacggcaataacaatgaatatccgaaaaatatagatttatctaacttatactttaatatttacatggatgtatttaacgatacaaccaacaaaatggaatattattttgacaacattgaactgacatatcaggattttgaataatttaaaaataatttatagatttcttcccaataaattctaaaacaaaaactcccaaagaatgagcacattcgcgggagtttttgttgctttaacttaattttgctatcagattttatatttgtaaactgttaaattttagtgttaaaaccgtatgagaagttttttaaaaaataaatattccgattattgctccgcatagtatataaataatcggatgaactttttttaagggctttatatagagtaaaactaaggttacggcacaaagtatcagggcttttatatccactagattcataagtttttttgtttcattgtataaatccaaagtgagaattgtgacttttataacctggtatgcggcaactgctattagaccggctactgccggacgtagtccataaaatatatcttgaacgatttggctttcctcaaacttttttaaatagtgagctattattatgataattataacagacggtactactaagcctattgtagcagagagagctccgaatactccggcggttgtgaaaccggtgaatgttgccatatttacacccataggtccgggggttgattctgatacagctatcatgttggatatatcgttcatatttatccactctggatatcttacggctatatcataaatgaacggtaatgtcgcaagaccgcctccgaccgcaaataaaccggttttaaaaaattcatagaacaaaagcagatatgtcattttttgattcgcctcctcagttgtccggcaataagaccgacgattaatgcgccgataacgacgtagacagatgatactcctaatattccggctactgcaaaagctgcgatgaaaataaccacgccggttaagtctttaacacccgacttaaaaaatttgactacagcgtttataatcaatgcggcaaccacagcgcgtattccgataaaggcatgagccactaagggaatatcggcgaagttttgaagaaatgctgcgattataattatgataacgagcgatgggaatattacaccggccgtggctaaaattgctccgggtatccctctgtatttgtagcctataaaagtggcggtgttaaccgcgataactcccggcgtgcattgtccgacggcaaaataattcataagttcttcttcggttgcccattttttattctgaaccacttcgcgctcgagaatcggcagcatagcgtaaccgccgccgaatgtcataactccgactttggcaaatgttaaaaacatgtctaaaaacacgtgcaatcatacccctccatgtcataattttttgtttataaagattttattatatacgagattatctgttaaccgcggttataacaggttttccttctctgtcgagcagcggtgttaagcctcctgcatttgaatctctgtgatacagatagtttattcctgtttctgtatcaacccaaatttctgtagtatttagtattccttgtgaatatattttttcaaatctatctttttccatattgagcttcctccaaatatctctaagaatttgtctaaaatattatacgtattatttttaaaaacgaatctgatttatagactggattaaataaaaacaatagatattattgacagaattaatccaatattaccataattttcagaagctgtaaatacacaaattttaatcaacagaagcggtaattttgtcaattttttgattgttgccatattgacaatcaataaacatagttgtataataattgaatagccacgttgaaatggcgtaatatccggttcggcgtgaataataaattattagtaagggagatgtgtttatatgatgaaaaacggtgccgatatagttatggaatgcttgctggagcagggggttgacacagtctttggatatccgggcggtactattttaaacgtctatgacgcattttataagtactctcataaaataaagcacattttgaccgctcatgaacagggagcggcacacgcggctgacggatatgccaggagcaccggcagaacaggggtatgttttgcaacatccggtccgggagcaacaaatttggttaccggtatagccacggcctatatggattctattcctcttattgccgttacatgcaacgtcgccactaactggctcggcaaagatacgtttcaggaggttgatattgtcggtgtgaccatgccgataaccaaacataactttttggttaaaaaggcttccgatatagcgcctacttttagaaaagcgtttagaatcgctgcttcgggacgtccgggaccggtgcttatagatataacaaaggacgctacggcagagcttgctgattatgagaaaaagatacctgagaaggtagataattataaaatagacagtgaagtttgtgattttgaaagagcaataaaacttattgaaaaagctgaacgtccgcttatatatgcgggcggaggaattatttcatctgcggcgtctagagagctgtgtaagtttcaggaaatgctggacgcacctgtcacattgtcattaatggggcttggggcttttccggccagcaatgaagcgtttaccgggatgattggtatgcacggtacaaaaaccacgtcgctggcaattaaaaattgtgatttgctgattgcaatcggcgcgagattctcggatagggttatttgtgacccggggacgtttgccagaaacgcgaaagtattacatattgatgttgacagcgctgaaattgataaaaatatcaagactgacgcttatataatcggagatgcaaaagcagttttggatgagcttaacaagagcttatcaaagcaaaagcatcctgaatggatgaaggagatagcagagtggaaagctgagtatccagttaaatataagggcagtgagaaattttcacctgaggatataataaaaacaataaaaagtgcagtagatgaagatacatatttagttacagatgttggacagcaccaaatttgggcggcacagttttttgatgttgataagcctagacattttgtcacatcaggcggtcttggcacaatgggattcgggcttggagcagctataggaacccaggttgcaaatccagacagtacggttataaatataacgggcgacggctgtttccacatgaatctacaggaattatcaactgccgctaaagaggagcttccggttattgatgttgttatgaacaacaatgtattgggaatggtaaggcagtggcaaaggctgttttatgataacagattttcaaacacaacacttaataagcgtaccaattatgacaaggttgccgagggcttaggagctaacgcttttacggtttcaaatgttgaggaacttaagaacgctctgagtgaagcgcttaaatcaaaggataagccaacggttattaactgtttgataaatcaagaccatacggttctgccaatggttccgggcggacagtcgatagaggaaccaattcttgaaatcaaagaagacggcggggaggtttagtattatgagtgataataaagagatgcacgttctgtcaatttatgtcgaaaaccatgcaggtgtgctcagccgaatttccgggctgttctccaggcgcatgtataatatagacagcttgtctgtgggagagacagagaatcctaaaatttcacgcatgacaattgtcacccatgctgatgacaatacattccgtcagatacagaaccagctggcaaagcttgaggatgtaaagcgcatatgcgagcttcacaaggatacttctgtgctgcgtgagcatgttttgataaaggttaatgcaaaagattccacgtcaataatgcagatgtgtcagatattcagagctaatgtagttgatgtatcaagggagcttttgacgcttgaactcaccggagggcccagtaaaatcaacgcatttatagagctgatggagcagtttgatattgagggcttggttcgtaccggtctcaccggtctcaagagaggtaagtccgaaagacctgaagaattgaatcagaaaaacaattaattttaatatacactgtataaataaaagatatttggaggtatttacaaatggcaaagttatatcacgaaagcgactgtaatttgggacttttaggcaataagaccgtagcggttatcggttacggaagccagggtcacgctcacgcgctgaatcttaaagagagcggagttaatgttattatcggtctttatgagggcagcaaatcatggaagacagctgaggaagccggatttgaggtttatacatcagcagaagccgctaagaaagctgatattataatgatacttatcaatgatgagaagcaggcaaatttatataaagaaagcattgagccaaatttggagccgggaaaagtattggcatttgctcatggtttcaatattcacttccagctcattactcctcctaaggatgttgacgttatcatgattgctcctaaaggtcctggtcacacagttcgcagtgaatatgttgcaggcaaaggcgttccttgtcttgttgctgttgctcaggacgctacaggaaacgctatggatataggtttggcttatgctgccggtattggcggagcaagagccggagttcttgaaacaacatttaaaatggaaacagagactgatttgttcggtgagcaggctgttctttgcggtggtgtaaccgctttgatgcaggcaggttttgaaactttggttgaagctggctatgacccacagaacgcatattttgagtgtatccacgaaatgaagcttatcgttgaccttatttatcacggtggattcagcgagatgagagcgtcaatttctgatactgctgaatatggtgattatgagattggaaagagaatcatcactgaggacacaaagaaagagatgaagaaagttctcgcagagattcaggacggcacttttgcaaagagctggataacagaaaatgctgttaaccgtccgcacttcaacgctacaagaagaattaaagccgaccatcagctcgagcacgtaggagctgaaataagaaagctgtattcatggaatgatgagaaataatttcaggaatacttatataaagtaaaaacagagggtttttacagagattgttttgtaattataacagtctgtgaaaaccctttttggtacataatagcggattaaattgcctgacagatatggtggtgaaacggcttggatttaactgacagacatattggtaagaacatagaggtatttgattctactttaagagacggagcccagggcgaggggataacattttcggttgaggataagcttaatatagtaaaagccttggattatgtgggagccgattatattgaggccgggaatccgggttccaaccctaaggatttggaatttttcaaagaaattgatttaggttctttgagacacgccaagcttgtagcatttggttccacccggcgtaaagatataaaagctgaggatgacgaaaactgtttgtcattattgtcggcggaaacagaagcggtggctgtgtttggcaaaacgtgggatatgcacgtaactgatataattaagaccagccttgatgaaaatctcaatatgatttcggatactgtcgcgttttttaaaagcaggggcaaggaagttatatttgatgccgagcattattttgacggatataagagaaacccggaatatgcggttaaggctttgatggctgccgcggaggccggggctgacagactggttctctgtgaaactaacggcggatgtctgccgtttgaagtagctgagattactgcggaaacctgcgatatatttaaagacagcattataggtattcactgtcataatgacagcggctgcgctgtggctaatactgttgcggcggttcaggccggtgcagaacatgttcagggtacgtatttgggatatggagaaaggtgcggaaatgcaaatctttctactattatacctaatcttcaaataaagctgggttataattgtgtgcccgaaaaaaatcttgaaaggtttaccagaaccgcgcgctggatttcagaggtagctaaccagcctttatacagaggtatgccgtatgtaggcggttcagccttttcacataaggcgggtatgcacatagacgcagtcacaaaagagtcgtcatcttttgaacatgtggcgcccggaagcgttgggaatgaacggagatttttgatgagcgaggttgccggccgcggcacggttcttaaaaagatacagaaaatagccccggtgcttacaaaggattctgctgaaacctctgagatatgcaagcgagttaaacagcttgagtatgaagggtattcgtttgaggcggctgaagccagctttgagcttttggtcaaagaggttttgggtgagaaaaagaagtattttgatttgaattattttaagacaacagttgaccagcctaatggaaataattttagttcttcagctattattaaaatcactgtcggagacagaactgagattacggcggcggagggagacggacctgtgcacgctttagacggggcgcttagaagggtgcttgaaggattttatcctgagctcagcggagttcatctgacggactataaggttcgcgttctggagccgcagaaagctacgggcgctaaagttagggttttgcttgaaagctccgatgagagcggaagctggactactgttggagtatccacagacgtgattgacgcgtcttggattgctctagttgagtctgtggaatataagctgatgaaggaagaagaaaaaataaatcaggaaacaggaggttaaagatatgggaatgacaatgactcagaaaattcttgccgcacatgccggtcttgacaacgttaaagcaggacagttaatccgtgcaaaactggatatggtattgggaaacgatgttacaactccggttgcaataaaggagtttaaagcggcaggctttgaaaaagtttttgataaggataaagtgtctatagttttggatcattttacgcctaataaagatattaagtcggcggaacattgtaaaatgtgccgtgagtttgctgttgagagagatgttactaatttttatgacgtgggcgaaatgggcgttgagcacgcattgctgcctgaaaaaggtttggtggctccgggtgaggttattataggggccgactcccatacttgtacatatggagcggtgggcgcgttttctaccggggttggttcaacagatatggcagcaggtatggctaccggtgaggcttggtttaaggttccggctgctttgaagtttaatcttaccggaaagcccggaaagtggatttcaggcaaggatgttattcttcatattattggaatgattggcgttgacggagctctttacaaatctatggagttcaccggagacggtcttaaatatttatctatagacgaccgtcttactatggcaaatatggctatagaagccggaggaaagaatggaatatttgaggttgatgatataaccgaggcttatcttaaagagagggttgaccgtgaatatacagtgtatactgctgatgaagacgcagagtatgagaaggtgtatgacattgatttgtctgagctgaaaccaactgttgcatttccgcatctgcctgaaaacacaaagacaatcgaccaggttggagaagttaaaattgaccagtgtgttataggttcatgtaccaatggcagacttgaggatttggaaaaagcggctgaggtatttaaaggaagacatgttgctaagaatgtcaggactataattattccggccacacagaagatatatcgtgaagctatgaacgagggtctgtttgatatatttatggacgcaggctgtgtaatttctactccgacttgcggtccttgcttaggcggacacatgggaattttggcagagggagaaagagcgatttctacttctaacagaaactttgtgggacgtatgggtcatccgaaatccgaggtttatttatcaagcccggtagtggctgcggcttcggcaatcaaaggttatatttgcagtcctgatgaattatagaaatatagattgatactataataaggaggttttttcaaatgaaagcacatggaaccgtccataaatatatggataacgttgatactgatgtaatcattccggctagatatttgaattcgtctgatccgtcggagctggcggctcattgtatggaggatatagattcagattttgttaataatgtgaagcagggagatataatagttgcacgcaacaattttggctgcggctcatctcgtgagcacgccccgatagcgattaaagcgtcgggaatcggatgtgttattgccgctacttttgcccggattttttaccgtaatgcgataaatattggtttgccgattatggaatgccatgaagcggcagaaaatataaatccgggtgatgaggttgaagtggattttgataccggtgtgattaaagatataacgactggcaaggagttcaaggcggaaccgttcccggaatttataaaagacataataaataaaaacggactgcttaactctataactaaagagaattagtatatatattagcggcggtattagtcattattttatcagttgggttttgccgccggaataatgaattattagattttaccattacagaaaataaacaagcatgataagaatgcggcaaaggctgcattagtgaatttgaaaggattatgatgtcagatgaatattaaattagcagttgtaaaaggtgacggaatcggacctgagataattaccgaggctgaaaaagttttagataagataggtgaaaaatttggtcatagctttgaatatactgatattcttgccggtggctgtgctattgatgagacaggaaagcctcttcctgaggaatctgttaaaatagcaaaggagtccgattcggtacttttgggagctgtaggaggaccaaaatgggatactctccctggcaatctaagacctgagagagcgcttttggggctccgttcggaacttggactttttgctaacataagacccgctaaactacatgatgtattggcagacgcatgtccgttaaaaccggaaatatcgaaagacggacttgatttagtgattgttagagagcttaccggcggattatattttggcgacagaggaagacgtcacagcggcaatgatggtgaagaggcttatgatgagttaaaatattctgaaaaagaaattgagagaatcggcagagttgcatttaatcttgcaatgaagcgtgacagaaagaaagttacaagcgttgacaaggcaaatgttattgagacctcaagactttggcgcgaagtaatgcacaagcttgccaaggagtatcctgctgttgagtttgaggatatgctggttgataactgtgctatgcagcttgtcagaaatccggctcaatttgatgttatagtaactgaaaacatgtttggtgatatattgtctgatgaagccagcatgacaacaggttctataggtatgcttccatcgtcttctttgggagtgggcacttttggtatgtatgagcctattcatggaagcgccccggatatagcaggtcaaaataaggctaatcctattgccacaatattatcatgcgctatgatgcttagagatagttttggactaatgaatgaggccaaagcggttgaaagcgcagtaactaaagtgttgaacgatggatacagaactgctgatataatggatgaaggcggaaagctcctgggaactaaagaaatgggcgataagattgttgaaaatctttagtttttaatttgtttagaaataaattaaagttgtagggctgtaaaagaataaagtcgtgataataaatcatacaaaaaactctataattgcgcgaaaacagcgctcttttcaaggtcaaagcctgaagagagcgctgttttttgtacaatgtttttgaaaaatatagtattttatagcccatttttgatttaaatacaataaaaaataggaaaccgaattccggttccctataaaatttatgaaaggaatgaatttttaatctcaaatgctgctgacaataaattatatcagtttgtctatgcttccgagattataaacgtttgtaaatcccatttcttttgctgttttcagtgccttttcagctcttgagccggcgctgcagtagaaaatcaaaactgtgtctttgctgtaagccgagagaccttcttcaattgtgtcgaccggaatatttactgagccttcaacagacttttctgcaaattcttctgcagaacgtacgtcaacaaatattccgccattatatacgagagtctcagcttcgtcggcttctatggaatctccgcctatgtcgctcatgttgatttccatatttttatttccgtcactaaggtacattatgccgttttctattctcatctctttaatatctatgtccgcagctttttttagcttatagcacttcatgcaatcagtgaaaactataactaatccatcgtcgcatcctgcataaagtctgcccttatattcagctaaattgtttatggtgaacttatctccatattgaaaatctatgtcagattcatagaaaaagtcagtgctgagttgcatgcgaatgccgcctgcagctatagtaaatacttttgtttcgccggttacatcgtttttggtaagaaccacgtcagtgtttccccattttgtgaactgtacaggtctgtcttcaccggctgcttccgtatcgttattgttggtgttagaatcttgtatgctattatcatttaattcggtgtttgtgttcgaagccgaagttccataatactcaacaattattgctgatacaaacttattgcttccgcttccgtaagtataaactggtgtggatatatcggttatttcagcgctgaaagctgtctttttacccgatacagaacttccttttgccagtttctcgccattttggacgatatattgttcgcgcttttcgccgccgtcaaacaatacggttactttacatggagctttaggggtaaagtacaaacaacgctgtgtctcactgccggcgccgcctttccatgattttgtaaacttgtagttataagttttttcgtttacgtcagtatacgtatattcacagctgcttgaagcattttggagggtgctgtaaccgcttaaaccgttaactgttccatatggctgaccatctggtgcgtctgccgcactggttagcttagtgtaatcaaaatctttgctgtctaatgagtatacaactatctcactgtctacaggtgttttgtaagtcttttcaactttctgtgcaagtggtttaatatcgcttaaactgttccagataaatatgtttactttatctccgtctgaagcgcccgtgtcaatttcatattcacctgtaccttttacatctgctgttgcgatgtttttaagtgctccttcatcatcataagctgctgtcatcattgttaccggagtggcaagagcacttcctcggtaactgagtgttattttcatcttgccgtttgctttattcaaaactttatctactacatacggttcatcatcgttgttttcgatatagtttaatctgaaataatcgagattagtgccgttagtttgaatataaactgtagcgcagccgtatttgtcaagtttgccatttagtaatgcttggtctattgcggttttgtctaatgtaagttctttttctgtccatttattccaacctccggttcccgccagcgatgctgaggcgattagattaccggtgtctgtatttttgtctaggctaacataaatatttcccgcattttttcctgcatatcgaactattagattatttagatttgaaagcttaattgatttatattctatccatgcgtctcctgtgcttcctgcatcttttccgccgctggtgcctgactgagcgtctgttaaatcagcgccgttgctgatgtcggcatattcaccctcaacctgcatattaatctgtaccataagtgttccgcatgtcatttcctcaacatttgcagcggtcacctggataataccatttccatatatggttaatatacctgtctcgttgtcaatgtcggcaactttacggacagaatcatcaaatttttgaatctgccaaacgagtttggaattatcaattacgtttccgttattgtcgtatgcctgaagctggattccggtgtatggattaatgttggtaactgttccctcagctccgttatacatcggtattccgccctcacgatagtcgatgacgcctttttctatataatttggattctctgaaacaatcttatatgagtctgcaagattatccatcggaacagaattcaaatcgtttattgctttagcaagcgttgtacttagctcatctcttgtgcttattttatcaatactttcgtttgcagcattataaattttttcaatttccgccaggttcgtgtctgaatatgcttgcttaggtaatttatcatatacaaacttcagatttgctttagcttcagcaatttcttccgcacttggcttaattttaagttcgtttactaccgggtatgaacttgattttgtaatgccgccaaccgtaacggttgctgttattgttgctataccgctctttgttccggatgatactataccgtttgtatcaactgaagctatttccggatttgaacttgtatattcaactttgtcagcgtttttaaggtcaaaccatgcttcgtcagtcataattgcagagagatcggaatcaatagtagttatactttcgtgagctgtgccgtcttcgcggataagtccgtgaactttaacgctgttcggtatagctgttacgtttttaagctcgctctttaaagttcctgttacgttaaactttgtgcttacacctgcgtcatcagcatttttagcgatctttgcagtgtattctccggcgttaacatataccttttgattcgtttcatcaaagagttttaaatcctctatattgagttcgattgaaacattttttgtttctcccggctgcagttcaactttgtcaaatcctttaagctgctgttttggcagttttaaaccgtcagctcccggaacagatacatataactgagctgcttctttacctgcggcagagccggtattttttatgtccacagtaaatgtgatttttccgtttgcgtctactgtgctgttgtcaacctttagatttgaatattcaaagtttgtataactgagcccataaccaaatggataaactgtgtttcctgtatgatactgataagttcttcccgggtatgttccgctgcttttaatgctgtaatcattatttttgaaagtaatgccgccttcgtttacattcttagcattaaaaggcatatttttaagagccgcgctcttataccatgttgttgttaacttacctgatgggtttacctgacctgttaatactttacctattgcagttccttgtgtctgtccgttgtatgatgtccaaagcattgctttacatttgttcatgaacggctcaacgttgagctgtccaacagcctgcatagcaacaactgtcttgtctggatacgcgtctgttaatactgtaacatgagactgatttttcggcaggtcgatgctttctctatcgttactctcgcctgaatctcctgtaggctctcttccaaacatagtacctgtataggcgataattatatctgctttatcaaggtcgtctttattatatttgtcaattgcgaaagcaggttcgtttgcgttgatagttaattccatatcgttaacgccgttatatccgccgtctgcacctgtgtaatctccgctgcattccttgtatgtatttaggtctgatgttgtttcagattttattgccgcctctttaggaccgcctattccataatgaatatcaattgaaccgccaggctgtgaaccggttgctatttcaatattgacttttttaactttactgaagtcaatgcttgggaaactgatttttgcagttctggtaacgtcagtaataattccgtctttaagagtggcgccgcttatagttgctttacttaaatcaagagttgtttttttgttgctgctatctatcaggtttatgctctttatattaaataatggagtagcgtctgaaacgcttccgatatatttaacatttgaacccggataggtgttttcaacttcagatttaattccgtcaaagggtgtaactgttttagtaggtacgcctgaatagtcgcccaaaataacttgggctgaatatgggcctactacaactatatttttatcttcactcttgagaggaagagtgttgtcgtcatttttaagaagtacccatgattcttctgccagagcttctgcaactgcaacgtgctcgtcgctctcgataatatcagttttgatatcctgatatttaccgccgtcgtcaaactcacctgttttcattcttgtgaggaataatctgtaaagattgacgtcaagctggtcttcagtcatatatccgccttttattgccgctaacattatgtcgggttcagcaccgccgcctccgctcagtgagcagtctatatctccgccgttcaaaaatgcttttggcataacttcctcaacaggcacagtttttatatctctgtcacggaaaagtcctttcttgagagcagcttttgagttcatattgctgaacgccgcacagtcgcctgtaacgtatccggtgaatccccagtttcttctgagcaaatcaagaagaatatatgagtttgctgaagaggctatataatctattgcctggccttctctagatataagagtgctgccgtttcttgaaattgtggttgcattgtatgagctcataacagacgcaggctgtgtgtcttccataatatcctggaacgctcttgagtagtattcgcgcagtgttgtttcatccattacggatgagccgtctgaacgctcactctctacattgtttgcaacaaaatgtttcagtgttgatattgtctttaaatatttttcgtcgtctccctgcatgcctttgacaaattcattagcaagctgagtagtgagatatggatcttctccgaatgtttcttcatttcttccccatctagggtctcgcgccatgttgatagtcgggctccaatatgacaactttgttcttgggtgttttgcccttgcttccgatgatgtcatgtcagccatttggaaaataagcgcacggttccaagtgttggacatagaaagaggagacgggaagcttgtggcttttccttctcttgctacgccgtgaagtgcttcactccaataatcatatgctccaacgccgaggcgcggtatagctgaggcttcatctgtcaactgtgttactttttcttcaagggtcattcttgaaactaagtcagccgcgcgttcttcaaatgtgtaatttgtatcaagatagattggtgtttcctgatttgggtcagttgtcggagccggtgttgcagttggcaagttcggatcagttgtaggctttggcgtggcggttgccgcttgactgttatatagttttacatatatatagtttccgcagtatgtatttgcaccttcgccagtaatgttaagagtgataagaccttcagcatcagttgtagtcaaagtttgagtaaatacattaaaagtctcccagccgctggtgttaatattgcttatagaagcaatttctgtatctccggcttttacaacaactgcagcgtttttctcgctggcaacgtataagtcgagtttgtcgtatccggaatttttcaagtttacacttggcaatgtgagaatcgcaatactgtcgtcattggttctgagattatccggtcttaaaattccgccgtgttctgagtcggtaacaatatcacccctgttgcctttaacggtgatagaatcttgtccaaaattgagcattaccgaaccgtcagaattttgggttaccgttccatagtcaatggcagctgtacttacctggttgttttctgtgtttgtattatcttcaatgctgactgcagaagccgatatcgctacgcatgacaatgccattgccaatgtcagtattaaagcaatacatcttttcattttcataaaaatacctcctgtttttttatttttattttatattttatacttgtattttaacatcaatcactgtataataacagtcaaacaaattatagttttagtcaattattgctatgtaatgagtatttttgggcaggcttgaaaatggttccattttataaattttaaacgttctgaattactataaagcaccttgagcgtaagttaagtttttatcagcatttgcacgaacatattaatataatatatatttttaataagggtcagcacattaatatagatacaaaagattatgttcaagcgccggtgagtctgctataatcttctctgacacagtttataaatattatcgtttgttcagttttcccctcagagcacttttaacagagcttttaaacgtgtctataatatgtctctatgataatataagggaagtataggagaactttataaatataataatcaaaattattgttttttaatgcggattaagctgcataatgtttggagcaagttgtgatattttaaattgcttataaataaaattataaataaaagataattttaaaattaaaagtgtttatagcaaacagttttataaggcaggataatagaaaaaacagctcttaaatttaagccgttttggcaaaactaagaactgttcatatatgttttgattcaatttattgtttaataactatttttctgcagtttattttttaacataaattttgtttgcttaacttatacccaaatttcatctaagcttccaaatgtgtaaccttcggataagatatattgaataagacgatcaagaacgtttgcgttatcagatgaacatgcgtgaagcagcattactgcgccgtcgtgaagatatggcgctatttgcgtgaatgctgtatcagctcctttttgatttgcggtatcccaatctgagtatgcaaaactccagaaaactgttttatatcccatatcatccgcaagctgaagagtacggctgctgtagcttccttcaggaggtctaatataattcatattaactccaaacatttcagcaaatctattggataactctgaaatttgataagctgcggattcgggagagactgtcggaaggataggatgtttaaaagtgtgatttcctactgtataaccatagttcagcattctttcaactaactcagggctttcttttagataatcgcctgtaataaagaatgctgcgggtatattatatttgtttaagacgtcaataatttgatttgtgtatccttcctcataaccttcgtcaaatgtcaaataaatttttttaggtcttgcggtgtctctgaatattactttatgatttgagattaaagaaaccacgctgctgtctatctcagaatagccgggcgcttttctaaaccaccaatcgtttctggtgttatctatattgtaatacgatgaataatcggatataataggttttggttcgggagaggcttttgccagcggctcataatcagttgaagaaaacgcgtttatccaagctttcatagccttaagctcaggaacccaatagatttcgccaacttcattaagttcttccagacgtatgaaagaggagccgcatgcgttgtatacatcaatgttttttccgttaaaaatcagcctagtgtcattcaatgtgtaacgtgaatattgtatgccggttttttgggccgggagcataacgttatctatgccgctaatctgagtttgattattttctgaagtttttaaatcaagattagcagtgcgcgtttcttcatcccagctcacgtcgaaaccatagagttccaaatcgcggactttaacaacaatatatccggtgtcagaagcatatgcaggtataggatagtggttgatatatgctgaaatatcggtatataataaacgtccggttactgaatcagcagatactgggaaagtatatactgatgatgtaatgaatatcataaaagaaactaagagcatactgatttttttcataagtaccaccttttatataatgtttaatatgtttccgcataaaaaaatgcgggttgtgtttaaaatttaatgatgtaaaaatattttcagttataaaaaattttttatctatgcgaagacttctgctaacttattttttgcattttacaagcagcatcattggtcttctaagctcgtccgacattccgggaatatccatcatttcaggcggcggaaccgcttcctgaaccgcctcgagctgaaatcctgtttttattaaacccattaatatttgggtcagagtatgatgctgtttaactacttccttacctaagaagttggtttgccgttctcctgtataaaagtaattgtctattggccagtattgaatactgccgtcagagccataaatccattcctgatttacacttccggtgaaaatcgggtgctcgatattaaatataaaagttccgccgggttttaatgttctgtatacttttttgtaaatctcatcaaggtcatttatataatgcagaacgagatttgaaactacgcagtcaaatgtgtttttcggataagagaagttatccaagccgcatacttcatacttgattttagggtcgttatttttcttttttgcttcccgtatcatgttttcgcttaaatcaatacccaagatttgtttggctccgttttctgctgcgtatttgcagtgccagccataaccacagcctaagtcaagaatagttttgtttttcaagtctggaaataattcttttaactggtgccattcgcctgctccgccaagacctttctgacttcgaggcatttttgaatattctttaaaaaaatctttgttatcataaatattattcattttttctttccttttaatatatctcttgttatagttttttaagctttttagtgaaaaaataactccgtttgattctttaaatcctgcactgatatgaaacagtctgatagtctcgctgctaagttcacaatcactggcaaaaccataacagcctttatagcccattgctcacattcgtgcagtagttttttgagtatcctttagcacggaaaatttctttgtataaaaattactttaagatacccaaccgggctaatttcagttccttcaaaataattatatcataattggcattgtgcaaatccgaccggtaccagtttttcaaaaacgaggaagataacagagttttttggaagggataatctatgaaaattcagttttcaaagattttattatatgattatctaaaagcattgcggtcaaatttgcctgtatatccaggcagatagagttgcatttctaatcattttgaaaagtcacctttcaaacgctttaagtgatatgctatttcttatcttttttatttttaatctcatcttttctggctctcagcatagcctcggttgcctctatttcttcttcagttttaagctgcggaataaaacttgacgcaacctttcccttgccacgtgttcttatgtagaaaaatccaaaaatagagaatattattgcgccgagacagttaaccaacatatctttcattgtgtctattaagccaatatccaaatatgaaccggttatggcataatcctgcggaacaccgtttattgttcccgatatgaccgttttggtaatatcttttattatgatagggtcgtttaacccactggggttcagcaaaacagaggaaatgtttggaacataccagtctttttgcatgtcggtcagaaaaaactgatccattccatattcaaaaaactcccaaatgacgcctatagtcatggaaaagcaaaacgccacaaacgctacgaaaagaggagacatattgatatgaaagtgcggatcctggttaagaatatctatcatagcaaaacctatagcggccatcataaatccgtttatggtatgaaggattgtatcccaaagcggaattattgtataaaagctttgaatctctcctaaaatttcggcagaaaaaataaaaaacattattacggcctcaagagcaataggcagttttatatttaattttctgtccacaaatgatggaatcataaataaaatcaaggtcaggacgcatgtaaagacatttgcatagttttccataaagaactgtcttaccataaccaaaatgaccaaaatactaagtatagtatgaattatttttcttttatcccgcttctttttaagagatacgtcttcattattaattcttcgcataatctctccccttttgaaattacaaatatggtctaattatatcaagtttagtcatcaaagtcaattatatatattttactgccggtaaagataaattttaagacaaaatataactgtttacttttattgttccaaatgttataatttatttattaaattaatatgtttggtattatattagtatgtagatatattgggagggaaaggatatgaggcaaaagatacagaagaagatgtttgaattttgttatctgctggaacttttaatttcctgcgtgataggtatagcagttgtgattttaggcgtcagattattccttgagatgataaacctcagcgtgttcagcggcggggataaaatattagagactattcttgacaaggcaatgatacttgctatcggcgtagagtttataaaaatgctttgccggcatactcccgaaacagtggtggaagttcttttgtttgcgattgccagacagttggttctggttcataaatcagctttggatattcttattgaagtggcggctattgcagcgttatttgctataagaaaatatttattgaccaagcgcgatgagagggaaagcgttggtgatactggaaagtctaaattaaacttttttaagaaagaggaagaagagaacaaaaaagttgatattctatgataatttaaaatttcgcctggctgaatgtcaggcttttttattagatttattttgtgttttaaattataaatgggtgtcggcggagggcaagataattctatattttcgataatgatactgcttcttagcgatgtaaacaaggtttaaaaaataacattaatgtttgcatatttgaattattgacactataggaatatcaagcagcagtagttgccgcattgagttttttatgtgaactaaatagttgtgtaaaaacggcacgctatatattatagcgtgccgtttaatatttaaactgtatttattttttatttgccggtgcgataactttataaactaatgccgctaaaattcctccgaccagaggagcaacaatgaacacccaaacctgtgccataggcaggctctttcctgcaaacagcattataagcgccggtccgaaacttctcgctgggtttactgaagtgcctgtgaatggaatacctaagatatgtaccagcgtaagggtaagccctattactaaaccggcaacagcggcgttttctattttagacgtaacgccgataatagctatgacaaatacgaatgtcaggattacttcaaccaggaatgcctgccacatgcctatgccaagagcgcttgcttcaccaaatccgttttgccccaaaccattctcggttcctaaaagtaaagctaaaattgcagctccggctataccgcctaaaaattgtgaaataagatatccgatataatcgtttaccgtcattttacctgaaaccagcataccggttgaaactgccgggttgatatgacagcctgatacgtttccgatagaatatgccatggcaacaattgataaaccaaaagcaaatgctatcagtaatgtagaaagcgccagcgcgctgccggtcataaccaaattggcgtcaccaatcagattgttggcagcaacagcgctgccgcagccaaagataaccaatacggccgttcctataaactcagacaaatactttctcattttacttcctcctctaaagttttatttattaatatatatttaacttacagatggtattataccatatttttctaagaagttcaataaaaaaagacggcaattcagccgtcttttgttaaatttgtattactttttattcaataatttcagcttttagtccaaaatgcttgaatgcggcttcgagctggttgtcaacaattactgtagtgttctgtagcgcgttatacaactctctttgtgttgttaagtcaagcacaccatatgggaagagctcctgattgttttgaaactgagctacagcgctttcaagttcgctgtcaaaatacgggtcattgatgtttccgttatacctgccccagacattcagtatctttttagctttggatatattagcatcgctttcgccgggattatatattctgctgtaatcaaagtcttcgtaacctgaataatcaaacggcacggaaccattctcaacaacggcgtcaggcgttattcctattttatcaatattttctccgctcggcgtcagataatatgcggcagtatatttcatagcttcgccgtcttttaatgagacgctgctctgaactgtccctttaccgtaagtttttgttccaatcaaaactccaacttcattttcttttattgcggccgccaaaatttcagaagcgctggcagagtattcatttaccaatacaactacgtcatttttctgagttctctcattgttagacttgtatgtaatatcaaaaagatcaactttgtggtcctcagtaacgattacgtttccattcggaacaaagtagtttgctacttttaccgcctgggttatataaccaccaccattatcgcggacgtctataataatattatttatattctgactgtcagcctccttaacggcagcgtcaaactggtctgatgtattgtccataaaaccatagatttttatatacataacattagctgaattctgttcgttttgttcatcgggagcggaaacaattttatacgccactgattgtttctcaccgatttcttctctggtcaaagtgaagtacaaaacgtcgtcgacaccttcacgtaaaactccgacggtcacaggggatccaacctgacctctgatatatttctgtgcaacttctatgctaacgccgagaagattattgccgtcagcgctgtagagtatgtctcctgtcaggattccggctttagccgccggggaattttcgtatactgaacctactaacaggtttccgttcgattcattaaatgttattccaataccgcctacggctccctcaagctgtgaaataaactgttcaaattctccgcttttataaaatacggaatgctcgtctattgagcctaaaatcgcactcataacggtttcataaagttccggatgctgttttaatatctctagcagtcctgctttatataatgacagttggttaacaccatccttagcatagacagaaagatagtctataacctgacttacgtaatcagatataaattccccgtcttgagactgatctgcaggagccgcagtcgaaacagctgtttcaggctcgtccgccgttacggttccgccaaatggtagaaccaaacaggaggccgctatcgcagcggctaacaatcttttgaaatttttcatattatacctcctaaaataataaggggcagaaagcccccataaaatttatattatattgtagttactgatactattctataaccgccgccggcaagagtggctactgtaacttttacattcatatccaaaaaccatgcaagggaactgaggtccagttcttcgccattgcttccgtttttgatattccctccaaaggcaggaatttcagtatattcaagctgtgcggcaatagcagtgttttcttcattcacaattacaggttttacatttttaagaacgattccctcatctttccagtcagataaaaacagaacaccggtatatgacgataggttcgttattatcttgttttcatcaaacgcaaaggccggcatggctgaaactattattaatgcggcaataagcagtcctgctgttagtttcttcataagcacctcctacattttttcaggggcagtaatcttaagcatattcagaacccctgcaataacttgtcttgtgcagtcaatcaatttcattctgcagtcacgcaggtcttcatcctcaacgttaacacggcaggcattataaaacgtgtggaaagcggaagccaaatccataacataacgcgtcatttttgacggctccaaactttcagccgatattcttatctcctcaggcaaatcgctgagcttctttaataaatccagctcggtttcatcagttaaaagttcgggctttatttcggcgtaaggtttgacgttaattccctcttcactcagaagtctcagtattccgcaaatcctggcgtgcgcatactgaacataaaataccggattgtcattgctttgttcctttgcaaggctgaggtcaaaatccaaatggcttccggcgcctcgcatattaaagaaaaatctagccgcgtcaatgctaacgtcttctaagaggtcgttcagagttattgcctttccggtacgtttagacattctgacaatctctccgtcctgcataagacggacaagctgcataagcacaatttccagtctgccggaatcaattcctactgctgagagcgcgtttttcattctggcaacatggccgtgatggtcggctccccaaatatttatagcaaggtcaaaatttctggtttcaagtttgtttatatgataggcgatatctgcggcaaagtaagtaggtattccgttttggcggacaagaacctcattcttttccagtcccatcttttcacagttcagccaaacagcgccgtcttcatcataagtatatccgtttttgcgcagacgttcaattgcagacgttacctcgtcgttcttgtgaagaaggctttctctgaaccacacgtcataatgaattctatatttctccaagtcagttttgagtgctgatatatttttttccagtgcataatctatcaaagcctgcttgcgttcatcttcgccgcagtccaggtatttgtctccataaagctttataaactcttttgcgtgttcggttatgtctccgccctgataaccgtcttcagggaactcaactgcatcctcgccttttaactgctggatataacgggcactgagcgacttgccgaacttttcaatttggttgccggcgtcgtttatataaaattcacgcgttacatcatatccggcgtattcaagcacggaggccaaacagtcaccgagagctccgccgcgggcgttgcccatgtgcataggacctgtaggatttgcgctgacaaactcgaccatcacctttttgcctttgccgagatcaatctttccgtaatcactgccctctttttcaatggattccatagttctataaagccagtcaggggcaaggtaaaagtttataaatccggctcctgcaacctcgatatcttttatatctccggacttgtcaatattcgaggttatagcgtctgcaatttttctaggcgcggttttgagctgttttgccaaaaccatggctatgttgcaggcaaaatctccgtgagatttgtccttaggcacctcaagtttagccaggctgcttatatctatattttcatcggtttcaggcaaactgccgtttgatacggcctctttatagcctgtgctgattttttcgattatttcactttttataccgtctatgatactcattcggttttcccctttgtaatcgtatatagttttattattaaatattttccgccgacggttttctattaaattccgtttcgcatttcaacacagaaacgtcagaaaaccggagcggacaactaattaatttcagattttgattccgtgccgctgtctgttctaactgtaaccgtcatattattctttataaaattttggttgtcggcgtctaaaagataattcatattaagagttccaccgttatcgccaaagtcaaaatttatattttcggtagttattgcggcgccgacttgtccatacggcgtatttatcagacagagacttttttcacctgtcagataattcatttttgaagtataacgtccgcttctgcgaacgctcacgttaccgtcgctgacttttatggtagtggtcgtatcttcaaagccggtcatgtcgctttcatcataaattatatatattttattgtttctgatagcatatttgccgactgtatcgagagcaattgtctcctgctcaccgtctaactcctggtttgtgcgtatggatataactgcattgttttccatattttcacctctcagtatttttctatatcgatttttgcaacgtcgccctcaatttttttagagagaaaaaggcttccgagttcttcaaatccgtgaactgtgtcgctgacataatattttgaattgcccatatcattgctgccggacagaagtccgtgcatttccatcatcctcttagcttcaccggccgcagcggcgcctgaatcaatcaaggtcacgccgtccccaaccacatcttgtattgtctttttcagcagaggatagtgggtacagcccagtataatggtgtcaacatcattctttagcataacgtcaagatattcctccgcaagcattctcgctattttagaatcagaatatccattttctaccaccggaacaaacatagggcaagcattagatatgacttttatttcgggatttaagttcccgattttttcggaatattttccgctgtttattgttccgctggtgcctaaaactccaatacgtccgtttttggtagcattcactgccaattttgaggcaggttccaccactccgataatatcggtgtcgtattctgttgtgatatgcggaagggcggcgctgctggcggttccgcaggctatgactataaattttatatcaaattttcttaaaaaatttatgtcttgccgcacatattttactatagtagcggagcttcttgtgccgtacggaactcttccggtatcgccgaaataaattatgttttcattcggcattatcttcatgacctcgcggacacatgtaagacctcctagaccggagtcaaaaatacctattggtctattatccattatatatcaccttatttattgtttttgtctagggcgtaatttataaggttgtcaagcagttcaaagttgccgacaccgctcttttcccacattttagggtacatacttatggaagtaaagcctgggagagtgtttatttcgtttaatctgactgcaccgctctccttgtcaacaaaaaagtcaactctagacagaccgccgcattcgcatattttatacgctcttatcgcatagtctttgagtttgtcttcaacgtctttggtcacattggcaggtatggttattttggaactgctgtcattatacttagcgtcaaaatcataaaactcattagccggagcaatctcaccaatattttcggcaaccatagggtctgtgtttcctatgaccgcgctttcaacctcgcttgcggcaacgaattcctcaatcaggactttactgtcatgttcaaaggcgagattcacaccttcgataagctcttctctgttatgcgccttgctgatacccacagatgagcctgcgtttgaaggttttataaaacaagggaagcccagtttttcttcaacattttttatccagttatcatttgaaatatccgaggttttgacggtaatccagtctgcttggggtatccctgcttctttaaacagaattttagccacgcatttgtccatacaaacagcgctgcctagaactcctgaaccaacatatgggattccggcaatttcaaataatccctgtattgttccgtcctcgccgtttttgccgtggagaacagggataataacgtctatttttatattttcaatgtctccattatttttaaatcttaaaagccctttatcgctgcgtgagggagaaaggatagccttgtcatattttccggccggcagagtggatatttcagacgtcggtttatcaaaatacatccagtttccttcagtatcaataaaaatcttatgtatattatatttggcagtatcaagagagtcaataaccgtagcggcggatatcttgctgatttcatgttcgcttgacacgccgccgaagatgacgcatacgtttaatttttccaaataaataaccttctttccaaaaagtttcatgttattgcggatttgacagccgcagcactaaatatctattttaacatatttcgcgataatttcaataggtataatttataaaaatatgttaaaaatctataacatgatataacttatggaagaataggaagtttattacattaaaattttaaagagcaaaagttttaggaggaagaattatgccaaaagtaaatttgatgagagtattcggagttatctgcgctgccgcgctggttcttgtcacagcagtttcttatatttcgtggcaggtcaacgatattgaggatagtgtgctcagattacatatcgttgcaaacagtgactcagatgaggatcaggcgcttaaacttaaggttagggatgaagtggtggaaagatgcggatttttgtttgaaaactgtgtttccgcggaacagtcaatcaaaaccgccgctgataatataggatttataaaatatgttgctgagcaggtcataaccgaaaatggttataattatgatgccgactgtcaggttacgcagtgctcttttcccacaaaacaatatgagcggccgggagacggagtggtatcacttcccagaggggaatataatgcgttaaacataaaaataggcgccgccaaagggaaaaattggtggtgtgttatgtatcctccgctatgctttgttgacggggttgcaagcgttccggatgagacggacgagcttttaaaatcccagctgactgcgtctgaatatgagctgataaccgagtcagaccgtccggaaataaaaataaagtttaaaattgcggaacttttaggcggacagcaggactgagccggcgttcataatatttaactattgatatttttcacctaatatgttataatttactatatttctgcggggtgatactgatgaaaaatattaaatacagactggcgaatttgttaggtcttaatactgacgcgtctttgtttgaaataaatcatgacgaaatacaaaaaacaaacctattgtttttgcagcagatttcttttacatcgggtttaattatgctgctgctttatcttgttagtttagttttgccgtctatagccgatttgagaatgacttattttatggaatttttagtttcggcaattatatttgttttaacctgcgtggcttttgacgcactgctgccgtattcgcttgtgctgacatattttttgacgtcggtgataatggcgtatggcgcgatagccgggatttatcaaactccggaaggcactgcaacggcttttattgttttgatttcgtttttgccaatgcttatatttgataaacaatcccatgttctgcctttttcggtggttttatggctgcttttctgtggtgcgacatttatgcttaaagattttaaatattcttcatttgatatattgaattcttccgcagggcttttaatgggtatcttaataaacgctaagatatttaaaataagaataagcggaataaacagcagcaggattttggcaaggcagacgcaggttgatgaactcacgggtctgcctaactataaaaagctgcttgaggatttgtcgggaaagaacgatacgaggattgcaaaatctctctgcagtttggctattattgatatagatatgtttaaagaatacaatacaaaatatggacgggaaatgggagataaatgtcttagaaaaataggtaattgtatgctgaagatttctgacccgggtgaacttatcgtctacaggtatggcggaacaagtcttgttgccgtcagtctcatacatgattataagggaatacaacgggtgtgccagggcttgtccgtccttataaagggtcttaatattgagttccagggaaccgaggaagaaaagattacagtaagctgcggttataccgacgttgtggaatgcgagtgcgacgagtttgaaaagcttttggacatggcaggcgaagctctgcagcaggctcgcaaagacggcggaaactgcagcgtcggctacttacaggtaaaagcgcttaaggaaagttaacttataatatgcggaatataataacataatttgggtgaagctgtttgattcatatgaacttattggttggggaattgaacagctttttgtgtatgaaaaaataatttaaaaagacagcgtttggttaaaaatgtatttaaaatagttgaaatttgtggtgttgctttttaataaatacaagttgtcttgaactctgttagttgtgtttttcatttaaaaattggaattatagttgtcgtttttaataatagaattctatattttagtaaatatttgttaaaggggggggtgttatgaaacttaaaaacctgtatactaatgaggtatataaagaaaagcaattgctggctgataattatgaaaaagttgttgatagtaataatgactttacaaaggttatacttaaaataggcggattttgtttttttatgctttttattacgtctatgtttataccatcatattacaatcttagaattgtatattttagcgtatttttgattttagcagctttttatcttttgattaaacttcgtgagaagtatgttgggatttggagcatttacgtcgttttcacagctgcggttgtatgtttcactctaacaggctcttttattaccccaaatgatattggggttatggttttggcgcttttacttacatttcctattattgtacttgataaatcaattagaataatacttactgagttttttttcttggtattttatattagcatgatttatttacataaagcgccgttgctggttattgatgaaatagttaattcaattttttcttttgtgttaggagttaccttaggtgaatattttagaatcgtcagactaaaaaattttgagcttgaaaggcaagctcatattcgtgaaacgacagatgttcttacacagctttttaataagcgtaaactttttgatttttttattgaatatgagaatggtgtttataaagaacccgttacagctatgtcgatactggatattgatgactttaaactatataatgatacttacggacatcagaccggagatgattgccttagacaaatcgggttatgtttaaaaaaattagaagggatttatcatttaactttttatcgatacggaggtgaagaatttgtagcggttttacatgatcctgatattgcggatataagcagtgtgttcgaaaaaataaatcaagccgttcggaatttaaatatttcacattctgctgtaagtaaaggtgttgttactgttagtattggcgtggtacctataaaatataattgtaaaccaaattttgaacaattgcttgataatgccgacaaagcgttgtattcagcaaaacgaaccggaaaagataagactgtaatattttgtgatgattttaatgaacctgatattcatggacattacagcagagttcatacataaaagttaaaaatataagttataaaatgttttaaaaatgaaaattctgtaaatttacggttacatggtcaaatatatcaatagataactaagtataaatataaaaataactttatataaaaaattgaaaaatgatatatttaaagtataatataatagtcaagtgaatatttttataataaaatttgcggctgaaatttatttcagccgcagtttattaatttaggcgtttaataaatgtataagaattagagcgccgcagaggtttaatcgacctaataaagtatctttattttccaaataaaaaattggttcttattgttttgtttaatttatatagataaactatgatgctaaaactctaattattatttaataaaatctaaaatttatccgctgccggcatgtcttgctgtagtttttgcagagtaaagtccaataaatagatgacaaattataaaaagactcttgttagaaaaacagaaaatattctgaaatagtaagttttttaatttattttatatgaatatttgatgtgcatgattaaaataacataacaaaaaccataataaaggattgtaaacaggcaattgacaacgcgtaggtatttgtaatacataataaaaatttggtaatactaatattcggttaacactttattacaaatcaagcaaaattgacacaaaataaaaaaaggtgatataatataagttaagctctgtacttattttaggaaaattctggatggtgcagaggtatatttattttgtgaaactagtaaattcagagtattattcaacttaaatttatatatagaggatgaagagaatgattcagcatattaaaaacggtgtggatttcagattaattccggcacaaaagtttaaaacaaatgttatcagtgttttctttaatattccgctttcaaaaagcacagtgacaaaagcggctttgctgccgtctgtcatgaaaagaggaacagaaaagcacaaaaccatgaatgagatatcaaaatacctcgacgaattgtacagcgcaactttgcgcgccggtatcaggagcaagggcgacggcgaggttatatacttcactgttgagtatataagggataaatttatcggcgagaacctgacacaaaagattgtggacttgctgaaagaatttatattctgtccgcttgcaggcgatgatggttttgttgaagagtatctaaacggagaaaaagaaaatttaaagaatgctattgaggggcttataaacgataaaaaggaatatgttgaggttaagtgccgtgaagctatgttcggaggcgagggttacggtatgtttgaagccggttttgctgaagaattgccgaatattacctccaaaaacttatatgagttttataagcatattataaacgatacaaaagtcgatatttttgccagcggagatttttcggacgaaactgtggaaatgctgaagacggagctcgccggagaatttgagcctagagattcaggctatgttaagactaaaatcgctgttccggaaggaaaagaaataaacagaatagttgaggaaatagcagttgttcagagtaagctttgtattgggttaaagtgtggtatagaacctacaagcaaagaatattatgcgcttatgctcggcggatgtattttcggcggcagtccgttttcaaaactgtttaccaacgttcgtgaaaaattgagccttgcatattatgcttctgtgagaacagagaggtttaagagcacaatgtttatcagcagcggcattgaaactgacaaatatcaggcggcctatgacgagatactggttcagtttaataaaatgaaaagcggtgatataactgacagcgaggtagtgaattcaaagctgtatctgactaatggtttcaactccatgaaagacggtttgagaacaatggaagactattatttatctcaggcgattatggataataagggcgagatagacgacctgatagaaatgaccaataaggttactaaagaagaaattgttgaagctttcaacaaggtagagatagatactgtgtattttcttaaaggctgtgcaagtgacggaggtgacgaataatgggaggatacaatattgaaagactgtatagcgagaacttagacgaggaaatgctttttgcaacgcacagcagcgggcttagagtttatgtgtttccgaaaaaggggttcagtaaatattacgctatttatggaacggactatggatcaaccgatagagagtttgttgttccgggagagaatcagaccactgtagtgcctgacggaatagctcattttcttgagcacaagatgtttgaacagcctgacggcagcaacgcatttgacagttttgcgctgacaggggcttccagcaatgcgtttacaagttttgacctgacagcttatttgttcagctgtactgataagttttatgagaatttggatattttaattgattttgtaaatcatccgtattttactaaggaaaatgttgagaaagaacaaggaataataggtcaggaaataaaaatgtatgacgacgatcctggctggagggtgttttttaacacgcttaccgcgctttttcataataaccctgtaaaaatagatattgccggaactgttgatagtattgctgagattgacgatgacgttttatataaatgctataatactttttacaatcccggaaatatgattttggtgctggcaggagatatagaaattcaaaaggttttagagagccttgataagcatatcagctccgacagaaatttgggaatcattgaaagacctaaaattgctgagccggaaagccgtgtgaaagagtttactgagcagaagctggttgtatctcaaccaatgtttcagataggatttaaggatataactccttttaacggcggagaagagcttttgtgccgtgaaatttcaacagatataattttggatatactgttcggaaagagcagtgatttctatatggaattatacagcgatggattgatagacagcagttttggggctgaaaccgagctggaaaagcgctatggcttcacaatgatcggcggagaatccaaagaccctaaagaggtctacagaagagttaaggagcatattaagaaagcgcaggatacgggactaagtcatgatgaaatagaaagggctaaaaaggttgcaaaggcttcgcttattaaagtgtttaacagtattgaggctatgggaaattcatttattcggcttctgtttaaaggggttaatcctctggagtatgcggcggctatagattccgttcccgatgtagcggtaaacgagcgccttaaaaaccactttgatttgtcaaactgtgttttgtcaacaattttgccggacgatagccaaaatgagggggagaaataatgataaacaatatttctttccccaatttggggcttaatttcaacataaaccgtgcggctttcagtataggaaatgttaatatctactggtatgggcttataatagcgctgggaatgattattgctcttgcttacggcatacgcgaatttaaaaggtgcggattaaagcaggacgaccttttaaatatgtttttgatttgcgtgccggttgctataatatgtgcaagactttattatgttattttcagctttgaccaataccgggacaatctgctgagtatttttgatattaggaacggcggtatagcagtttatggaagtttaataggcgccggtattgtggtgcttgtatattgtctgaaaaagaaaataaatttgggagcggttttggatattcttgctgtcggatttttgataggacaggcagtagggcgctggggcaattttgtaaacggtgaagcatttggaacggctacaacactgccttgggcgatgacgattgcgtccgacggggttacatatgcggagtctgtgcaccctacttttctttatgaatcattgtgggatttagccggggttatcatacttcttgtttacagaaaacataaagggtttaacggagagatatttttaggctacattctttggtatggtattggaagattttggatagaggggcttagaaccgattcgctatacctaggtccgcttagaatttctcaggttgttgctcttatgtcagttttcttggggcttgcaggaatagccgccgggcggtttttaaaacataagaatatcaaaatcagcgttggaaaaccgaaagggactgaaaagagcagtcttgaagaacccaaagacgataatgatgacatagatgagtaatattttttgcgttaaaaattattttatttatattattttatgggaggattatattatggaacaggatattcaagtattgagacagcggatggctgagttggttaaaaatgagaacctgaaatatgatgatatatataaaatgaaacttgagatggatgatataatcgacaaatactattttgaacagatataacaaaagtggctgaaaactttcaaagcagctgaacactgcaaataatataataccagtaaaaattctatgttcggcgcttatattttgacagggatgctgactgaagtatttgaagattattaattacgataacgtcaaaaatacttgacaggaaccgtgtaagtatttttaaatgatttcctattgacctgttgagactaatatgttaaacttgtattaagatagttattcgttctgaccacaagggtttgcccgcgtgaaaaggcgaaggataaatggctgtcatgcgtttgtatgacaagtttacgtgcgtgcatgggcgccttttttgaataaatcaaataggtgacagaatcctttcgctttgcgggaggattttttattttgtaaagagggtgattaaaatggaaaatgtaaaaaaacttgaagatacaaggatagcgcttgttggaattattgtagaaaatcttgatatcactgataagataaatcgtataatccatgattacagtgattatatagtcgggagaatgggtataccgtataaaaaccgcggtgtggctattataagtcttgtgattgacgccccggtgaatataatttcatccttgtcgggcaagctggggatgcttgatgacgtatctgtcaaggttcagtatacaaaagtataaaacacagtaaattttttataaggagataatattatggaaaactataagtatgatgtgaagtcatcaaaggcagaggaatttattaatgacggagagataaacgatacgctgaaatatgcctcagaaaataagacaaacagaacgctgattaaatctataattgaaaaagcaagggaaagaaaggggctgaatcatagggaagccgctgttcttttggattgtgaactggaggacttaaaccaggagatgtttgagttagccagggagataaaacaaaagatatatggaaatcgcatagttatgtttgctccgctgtatctttcaaattattgcgttaacggttgtgtatattgcccgtatcatgccaaaaataaaaccatatgccgcaaaaaactgacacaggaacaagtgagagcggaaacgatagcgctgcaggatatgggtcacaagcgtttagctttggaggccggagaggatccggtcaacaatcctcttgaatatatactggaatgtatagacactatctacagcataaaacacaaaaatggcgctatacgcagagttaatgtgaatatagcggcgactactgttgaaaattataaaaggctgaaagacgccggaataggcacatacatattgtttcaggaaacgtataacaaagaaaattacctgaatcttcatcccaccggtcctaaacatgattatgcttatcatactgaggctatggacagagctatgcagggaggtattgatgacgtgggctgcggcgtgctgttcggattaaatttgtacagatatgactttgttggtcttctaatgcatgccgagcatcttgaggcagcttttggggtaggtccgcacactatcagtgttccgagaatctgtccggctgatgatattgacgttgaagatttttcaaacgctgtttcagatgagatattccaaaagataattgctgttattcgaattgcagtaccatataccggtatgattatttcaaccagagagagccaaaagagccgtgaaaaagccctgcagcttggaatttcacaaataagcggagcgtcaagcaccagcgttgggggatatgtggagaaagaaactgacgaaaataacactgcccaatttgacagaagcgatacgagaacactggatgaggttcttaactggctgttggagcttggatatatacccagcttctgtactgcctgttatcgtcagggcagaacaggagaccgttttatgcctttggcaaaatcgggagctatacagaattgctgtcagcctaacgcacttttgacgcttaaagagtatcttgaggattatgcttcagaagataccaaaataaaaggcgacaaagttattgccgctgaagttaagaaaattccaaatgataaggttagagaaacaactattgattatttagataagattgttcatggaagccgagattttagattttaaattataaacagccgcatttcgagattgcttcaaaagttggaataaaaatcgagcttttgaagttagttcatttgcggctgttttttgtattttataataaaaatatcgtgttaatggagaagtgttactgtgtgctttcaaatgttattatatgcactgactttttttattaaacctgaagtgttagtaacccaaattgaggtgtgaatatgtaaaatgttaacttattccgacaaatctgcatcaacattaatatataattaaagcagattttttgctggttagacgcgcattctaggtaagttttaaaatttactctatgttcatatcacacgctcatctatatatgctaagtgtgtgatgacaattatagtatacagaattttgttaaggtttttttattcaatatcaaaaaattacttagttgtgataatatacatcccgctattttcatcttgaatctgcgcttcaagatgaaaagccttgaactttcccgctgactttgtaaactgccgcgaaaaaagatttctcgaattccggttgattacttatcgaaaaactgagttttcagtattaaaaatacacagaaatgaggattttcagtgaacctcggaaggtgtgaccccacatgacgggtgggtgtgatacaaagtactttgttttatctagcctacaatgtcaattgtggctacacttttgtttaaaagtgtatgttatataaaccatataatgtcatataaactataaacgccaataattaacttagttgtcatataataaataacttagttgtgatgtgttgcaaacgtagtttgccgcgttaggtgggctattatctgaaaacgcagtgctcaatattatatactttccaggttgaaaaattattattgcgttacgtgaaaaaataaaattattctgttaacaaatataaatataataaaaaacaaagataattttatataaatcgaaaaatatttataccgttataaaaaatgtgtgtacgtcaatcctattttattgtttattttgttttttaaatcccattgcttttttagaattatgttattataatattatatgaaggctgaatcttttcatcattgaaaaaggtttggtttttcattttagtttaacaaatgtttgttagacggggaaagaggatgaatatgggaaaggattttattatagaaaatttaaaaaacgccggaaaaaatattaaagaaaattttaaatcttatacattggattttatttttatagtgttgtttatatcagtgtttcaaacagtatttggtcaggaaaataatatagtcggggttatattaactatattgatggcttcatcaatgatgagagatttgacttctacgcctttaaaacatttagtgattcaatcttcggttttggtggctatggcggtttctgcctgtttggtagtgattcttaacccgtggattgctcttataattaattttattatgataacgataatattatattcttttacatatgagtacgctagtaatctatattttccatatattttatcctacttgtttatgatttttattggacctgttaccttggaacagctgccgaaacgtgttttgagtatgctggcgggcgctctgtgtataatggcatatcagtttgttaaaggaagaaaacgggttgttgatacaacgagggattcgctgactgtaataatagacgaggctttggtttgtacccagtgtttgattgacggagccggtaaacctgcagatttagaagaggtccgcaaaaatttgtataagctttgtaaaatggtctatgagcgcagaaaaagggttttatgtgtgtctgacgccaactttgccatgatagacagtgccaggggattagaaaatctaatattggttttatatgaaatgaccggtccgataacgcctgacagaattgagattttaaagaaagttaaagaaaaacttaaggaattccgtgcatttgtgcagcgtgaagtgaattgcttaaaagatatggatttctctgattttgccggaagcaattcttcagcggagactgaagaaatttttaggtgcgtagaatatatagctatacatttaaaacgaatgacagatcctaaacgtcgggttaaataccgccgaactgttttatcgtttgcggtgcgtttaaaggcggcattaaatctgagtcctgttcgtgttgtgtatgcgcttagggttgcagttttgctctcagcggcaactttaatagttcagcttttaggactgccccatggaaagtggcttttgtttactattgcctcagtttctttgccatatgctgatgatgttgggaaaaaggcgagacagcgttttacagcaagcgttattggctgtgtaataggtatggcctcatatgctttagttccgtcagctgtcgggcgtacagctctcatgatgttttcgggatatatcagttactatttttcgggttataccggaacatttgcgtgttcaacaatcggcgctttgggcggggctgtctttatgaacggttttggctggtatgacgttgggagcatggctgtggttcgaatagtgtatattgcagtaggaattctagcagcagtggcagcaaaccgtttgatattgccatttagaaggtctgctgcaacaaaacagctctggaagaagtatgagaatacggttaaacttcttacggtgatatgtgaaagtgacgatgcagatacacaattgtattacagtttagtaatacagtcgcacctgcttgaggaaaaactgttggagaatgctattaatgaaaattggaatggtattgataatatgcttagcgagtgccgagctttggtgcgcagcgctcacaggaaaaattcttttggtactttgattgcaaataatctcagctagttattatataaacttccaatttttatttatactattggcggcggtttcaaagtgatattttagaattcccaaatcgatttttgagtaagcgccgccaaaagacttaacgctgacttctaaatcattgagtgaaaagaaaaatttttgccggttcattgctgttggtgccagcatagcggaatttactcctgctaaaaaccagtcggggatgttttcattataatcgcagactttttctatgggtttgtttttatgcggtttcccttgggtctgaccatagcctagagtgattacgcagaccagtttttcaccgtctccggcagtatagctgcttttctttttcttatatgttgcagctacccagcaggtattaagacccagctgttgagctttcagcactaagtgttctccgtaataacctattttttcatcaagattaacatctgatttgctcaccatggcaaaatagtttgtaacatttttgaacatgccgtagtgtgccgtaaaaccactgaaagcttccggttcattagtaatcagctgtatattgagattgcttttgtgattgcaaacttctacctcagactttagttcctctataatattatttgggataatttgattagtatattttctaactgaatgacggttatttattgcttctgaaatattcatgaatattacctcctttagccaattatacacatataaaaatgaatagtcaaaataattttttataggataaaatatgattttgtcaaatggacagattatttggtgtttttgttgttacaattgaacaacatatagaaatgttcataaaaaatcgcttgacatgaatttaacggtaacttataatactatcattagataaattcacataaagataaataccatataacctatatggtgtattatagaaatgaggaaaatgtaatgaatgaagaaaagaaaaaagctcttgaccttgcactgagtcatattgaaaaacaatatggatccggcgctgtaatgcgtcttggagaaaagcctgatgcaaatgttgaggcaatccctaccggggctttgtcacttgatattgcattgggaatcggcggaatacccagaggcaggattattgaaatatatggacctgaatcgtcaggtaagacaactgttgccctgcatgtggtagcacaggtgcagaaaatgggcggagaagcagcgtttatagacgccgaacatgctcttgaccctatttatgctgaggctttgggagttcagaccgatgacttgatagtttcacagccggataccggagaacaggccttagaaataaccgaacagcttgtaagaagcggtgcggttgatgtaatagttattgactctgttgcagcgcttgttcctaaagcagaaattgaagggcttatgggtgattctcatgtggggctccaggcacgactgatgtctcaggctctcagaaagctggcaggtattatttcgaaatctaatacaactgcaatttttataaatcagctgcgtgaaaaagttggggttatgtttggcaatcctgagactactaccggcggacgtgcgctgaaattctatgcttccgtaaggctcgatgtcagacgtatcgaaagtcttaaaggcgacggcggagttataggaaacagaacaagaataaaagtagttaaaaataaggttgctccaccgtttaaagaagctgaatttgatattatgtatggtgagggaatatcaagagaaggaaatatacttgacgttgccgttgatatggatatagttaaaaagagcggctcgtggttcagttataatgaggaaaggctgggacagggacgtgaaactgttaagtctattttaaaggataatcctgagcttgctgatgagatagaaaataagattcgtgaaagcgccggactgcctatgattggagaagaggcggagagcatgtttgacgaaaagcctgttgcaggattagaaaaaccaaagaagaaaaaataaattgttttgaaaacttctatttaggtaagtgataaaaatgatggatgagatattaaaagggaaaaaacttgctatgagatttctcgcttcaagaatgtatacctcaagagaaatctttgataaactgcgccgtaaaggttatagttcagaattggcggagagtatagtaagtgaacttatcagtgaaggttttttagatgacaaacattatgctgactgttatattgctgatggtgtaaacataggatacaaggggacttttcgtatcaggcaggaactcttgcgcaaaggcgtatcgtcttcaataattgaccgcgcgtttgatgaggctgatgttgacccggagaatgctttgcgtgaatttgtaaagcaaaggctgcaggttgctgatattactacaagaaaagagtatgaaaaattcagaaccatgctggcacgccgaggcttttcactcagtgagataagaaccgttttggatgagttcgatatagagttttacttagaggattagattgaaatttaaggagaaagccgatttgaaaaaaatatctatggcgtcgctcggatgctcaaaaaatcagatagacagcgaacaaatgctgtcaatacttgaagaagccggttatgagatttgtgagaatgaagaggatgcaaatattataatcgttaatacatgcacatttattgaggatgctcagcgagaatcgattgactgtattcttgagctttcacaatacaaaaattccggcaatgctgaattattgatagtaaccggctgtcttgcgcagcggtataaggagcagatattatctgagatacccgaggttgacgcggttataggaactaacgagtatgacagaatagccgaggttatagaaagctgcctgaacgaagacgataaacctgttaaatgttcggagaagccgcttctttgtgagcacgaaagggttcgtaccacccctggatatacagcttttttaaagatagccgagggctgtgataaccgttgtacatattgtgttataccatctatccgcggaaattatagaagccgtaaaattgaggacattttagatgaagctcataaaatggctgaggacggagttaaagaaattattgtaatagctcaggacacaactagatatggtattgatatttatgatgaatatgcccttccgaaacttctcagagagctttgcaggatagacgggatagaatgggtgaggattcattattgttatccggagcttgtgactgatgagctgattgatgttatagcagaagaaaacaaaatttgtaattatcttgatatacctattcagcatataaatgataaaattttaaagcggatgggacgaagaacaggtaaggaacaaatagttactttgttgagtaagctcaggaggagaatacccgatatagttataagaacatctcttatcgttggatttccgggagagagcgagtctgactttttggagctgaatgagtttgttgaaaaagctgaatttgacaggctcggcgtatttacttattcgagagaagaggatacgcctgcatataatcttcctgaccaggttgatgaagaagaaaaagtgcgccgccaagaaatgataatgtttacgcaggcagaaatagacgatatgaagaatcagaacaaaatcggaagtattgtcaaagtgcttgttgaagggcgtgatgaaataataaaaagttattacggcagaacttatgcagattccatggagatagacggaaaagtgttttttaaatcgggaagaaagcttaatgaaggcgattttgttgatgttaaagttgaacaggcaatggatatggatttatttggatctgaggtataacttgtgcaattaatgatttataaaattgttttgtggaggaaataatatgaacttacctaataaattaactttgcttagagtgatactgataccattgtttatgattttattcttgagctgcggcactgttggtttatatttagccttggtgacttttattttggcggctgtgactgatttttttgatggtcaaatagccagaagaacaaacagcattacaacatttggaaaacttatggatccaatggcggataaacttttgacactgggagcattagtttgttttttggctgcagatgtgccttatataaacgcatgggttttgataataattattgcaagagaattgattgtaaccggtatgcgtatgctggctcttgaacaaaacagggttatttcagccagcttctttggaaagcttaaaactgtttcacaatttgcaatgattattgtggtgctgataaatcaaatagtaatggttggaaaagatccattgcaggggggattcggcaattttcttgtaatgatattggttataatctctgtagtgctgactgttctttcagggatagattatgtatataaaaacagggaattgttaacgtttaagtaacggggatgttacatgaatgtaacatgtattgaaattttgagagttttatattaatgtgttagcgatagataggaatgagaatatgaatataatagtagacgcgatgggcggagacaacgccccggaagaaattgtaaagggctgtataatggcagcaaatgattttggtgaaattattacactggtaggaaaaaaggatataatcagcgaacatttaaaaaaggccggatataacggagataggataaagatacaaaatgctgaggaagtaataagcggagacgatgagccgactaccgcgataagacagaaaaaggattcgtctttaagggttgggcttgatatgctccataaaggtcagggagacgttatggtcagtgccgggaacaccggggctttgataaccggagccactctgatagtcaaaagaataaagggagtaagacgcgtggctttggcgcctctaatgccggctgaaacaggctgttttttgttggtcgacggaggagctaatgttgagtcaagcgcggcattcttaaaacagtttgcaataatgggttctatatatatggagaaaattatgcatattaagaatccaagagtaggattagttaatataggttctgaagaagaaaagggaaccgaggatgttacagaagcaaacaggcttttgaaagaaataccgataaactatactggatatattgagggccgtgaaattccatgcggagcggttgacgttgtagtgtgtgatggatttacaggaaatgtaattttaaagtttatggaaggtatgggaatagtaataaaacgaatgttgaagggtatttttttcaaaaaccttaaaactaagattgcggctcttatggttaagggcggaattaatgagcttggtaaaactcttgattatactgaatacggtggagctccgcttttaggatgtacaaagccggtagtaaaggcgcatgggagttctaatgcgaaagcgttttatcatgcaatcagacagtctatagatatggtgaacaataatctagtggacactatttctgaaaatataaataaatattgatttaaagggatggattgatgcttcggcatagaatagtgttaaaaatctatgctgtgaaaatattataggaaaggcaatgatgatatgagtaaaaagcatgcaaaaattgttggcgtaggcagatatctgcccgaaaagatacttgataacgcttattttgagggtatagtcgaaaccagtgatgaatggattctgcaaagagttggtataaaagaacgccgaatgagtgatgaaaatacatttgcttctgatcttgcggcaaaggcggcagaaaatgccttaaaagacgccggcatggatgcgagtgagattgaccttattgttatggcttcggtgtcgccggagatgtatacgccgtcaggcgcatgtattgtgcaaagtaagataggtgccaagaatgctgcggcctttgatgtgaatgcggcgtgcccggggtttattttcgccattactgtcgctactcagtttgttgaaaacggagtttataaaaatgtgttagttatcggagcggatactctgacgaaaattactgaatataaagacagaagcacatgcgttttgttcggagacggcgcaggcgctgcaattttgcaggctactgatgaagagacaggggtcttgggttcagttttaggcgctgacggcgacgcaggggatgttttaactgtgtgtggattaaaagtttctgagcttgataaagagagacgtccgtttggaaactacagaactatttggatggacgggcagttggtatataagtttgctgtgaagacaatggtaagttcgacaatagaagtggttgaaaatgctgggtatacgattgatgatatagatttggttattcctcaccaagcgaatcaaaggataatacaaagtgccagaaagaggctgggtcttgatgaaagccgagtattttccaatgttgagcagtttggaaatatgtctgccgcatgtatcccggtagctttgtgtcaggctatagaggaaggcagaataaaaaaaggtcaaaaattggttatagtgagtatgggcggcggtcttacatggggcagtgtgcttattgaattgtaaacatgttctttaggaggaaaatatgaacagaatttgtgaattacttggtatagagtatccgattatacagggtggtatggcttgggtggccactgctgaacttgcggcggctgtgtcaaatgccggaggtttgggattgattgcggctggcggtgcgcctgctgacgtggtcagagagcagattaagaaagccagaaccttaacagataagccgtttggcgttaatgttatgctgatgtctccgttttccgatgaggtaatggaagtggttatagaagaaaagccggcagttgttgccacgggagcaggtaaccctggcaagtacatagaaagactgaaggaagccggaattaaaattatgccggttatagcgagcgtagctatggctaaaagaatggaaaaagctggagctgacgcggtaatagctgaaggaaccgaagcaggaggccacattggtgagctaaccaccatggttctcacaccgcaggttgtggacgcggtttctattccggttgtgtctgccggcggatatgctgacagcagaggtactaaggcagcgtttgctttgggcgcagacggtatacaggttgggactagatttatttgttcaactgaatgtattgcacatgaaaattacaaaaatgctgttttaaaggccaaagacagagacgctgttgttaccggacgttcaacaggagcgcctgtcagagctttgagaaataagctgaccaaagaatatcagagacttgaaaaagaaggagcttctgccgaggagatagaggaacttggagtaggcggtttaagacgcgcctttcaagacggtgatattgaaaacggttctcttatggcagggcaaagcgcagctatggtgcatgagatacagccatgttctgagatagttaaagattattttaaggatgttgaattttaaatatactgttgtatattagatagagttattgttttacatatgcggtcttatccggctcacggtaagaaacgcggtcttataacaatgtgagccagaaaggctatgataaatatgaaaacagcatttttattttcaggacagggagcacaggctattggaatgggtaaagagctttgtgagaactttcctgtagctgacgaggtttttaacagcgcaagcgaagctttgggatttgatataaaggatatggtttggaacggtgataaggacactttaatgataactgagaatacacagccggccatcttgactatgtctgtggcggctttaagagtggctgaaagattaggtcttacaccagatgttgttgccggacttagtcttggagaatacactgctcacgtagcttcaggaagcatggagtttacggacgcggttaagcttgttaagaagagaggcaagtatatgcaggaggaagttcctttgggagtaggcgcaatggctgcgataattgcgttaacgcctgaggatgtaaaagaaatatgtaagcaggcttcaagcaaaggaatatgtgagccggcaaactttaactgtccgggacagattaccgtggccggtgaggttgcggctgttgaatacgcgtgtgaacttgcaaaggaaaaaggcgctaagcgcgctatgctaatgcctgtttcagcgccgtttcactgcagtatgttaaagggcgccggagagaaacttgaaaaagaacttgaaaatgtcactgtatctgaaatgaatgttccaataattaccaatgtgacaggtgattacataaagagcaaggatgaaataaaagagcttttggttcgtcaggtttcaagctcagtattatttgaagaaagtttaaaaagaatgatagctgacggagtagatacatttattgaaataggacccggaaaggctctgagcggttttgttaagagaatagataagactaaaactattttaaatattgaagatatggcgtcattagaaaagacaaaagaggcattaagcttataataaatgttctgttttttcaaacagagttagataaatattttttgaaaagtttgactgccaattataattaacaatcggaggtagtgaaagtggagtttaaggataagtgtgttatagttaccggaagtgccagaggaataggcagagaaatagctcttaagtttggcgctgagggtgcaaatgtagtcgtgtttgatataaatatagacggtcaggcagaaactgctcaggcggtatgtgatgaaataaaagcattgggaggagacgctaaatacatattgggtgatgtctcaaaaccggatgatactgacgcactgataaagtttgcaaaagatgaatttggaagcgttgatgttatagtcaataatgcaggtataacaagggataatcttattatgcgaatgagcgagtctgattgggacgctgttcttactgttaacttgaagggagcgtttaatgttattaaatcagctacacgtactttaatgaagcaaagaaacggcgttataataaatatggcgtctgtatccggcgtgacaggcaacgcaggtcaggctaattattcagcttctaaggctggcttaataggtcttactaaatctgttgccaaagagcttgcttcgcgtaatatacgctgtaatgcaattgctccaggatttatcagaacacctatgactgataagctcagtgaggatatacagcagtcttacaaagattctattccgcttaaaaagtttggacaagttgaggatatagctaatttagcggtattccttggcagtgacaaatcagaatatattacaggtcaagtaataaatgttgacggcggacttgtaatgtgatataactatttatagtaaaaataaatttatataaataaaaatgaaattttattttggaggagaattgaaatggaaatttttgaaaaagtaaaggaaatcacagttgatcagctcggagtatcagaggacgctgtaactatggaagcatcatttattgatgatttggaagcagattctcttgacattgttgaattaatgatggctcttgaagaagaattcgacatagagattcctgatgaggatgctgaaaagattacagcggttaaagatgctgttgaatacattaaagaacatcaagactaattatgcaataggctggactgcggagattaaaaaatctccgcgggtttccagactcggtatgaattatatagaagtttgcatccggcttgatgttatgcggtgcaagtctctatatgatttgaccgtgtctaaatcgtatttgattttgttttcctgcatatttttgcgggcaatggttatttattttgatgctgtgcatcggattgaaataggaggataaatatgaatagagtggttgtaacaggcgttgggggagttaccccggttggtataggcagagaagaaatttgggaaaatattaaaaacggtgtatcaggcattggcactattacaagatttgacccaacagattttgcatgtcatgttggagctgaggtcaaagactttcaggttacagattatattgataaaaaagaagctaagcgtatggacttgtttgtacagtatgcggttgccggagctaaaatggctattgaggacgcaaaacttgatatggacagtgaagacccaactagagtaggcgttatggttggatccggaatcggcggaataaacaccttatgtgaacagcataaaagaatgcttgagaaggggccgggaaaggtttctccatttatgataccgatgatgatttcaaatatggccgtaggtcaaattggaattatgtttaattgtaaaggtattaatatgactactgtttctgcatgtgcttccggaactgattctattggtcatgcaatgcttgccgttcagcgcggagacgctgacgttataatagcgggcggagctgaggctactataaatgaacttgctttggctggattttcatcaatgaaggctttaacaaccaggaacgatatacctgagaaagcatgttcaccttttgacgctaatcgagatggttttattatgggtgaaggcagtggtattcttataatcgaaagtttggaacatgcgcttcagagaggagctaacataatagcagaacttgttggatatggttcaacgaatgacgcatatcatatgacggctcctgctcctgaaggtgaaggcggtgcaaggtgtttagcactggctgtcaaagacgccggaataaaacctgaagatattgactatataaatgctcatggaacatcaacaccttataatgataagtttgaaactgcagcaattaagactgtttttggggatcatgcatataagctggctgtaagttcaaccaaatccatgacgggacatatgcttggcgctgccggcggagttgagggaataattacagcacttgctgttaaagacgactatttgccgcctacgattaatctcgaaacccctgaccctgaatgtgatttggactatgttcctaataagggcagaaagtctgaaataaattatgctatatcgaattcattaggatttggcggacataatgcttctatcgtgtttaagaagtatactgattagtaaatacataatatcaggtcgggagggtcaatcctcccgatttttatatgacaaagattaagaggttatttatatggtgattataataggaggagcgagccatagcggaaaaacttttttatctaaaaagctaattgaaaagtataaaattccctgcactagcttagaccacataaaaatgggattgatacgcggttttaatgactgcggtttttcagcagttgacagcgatgagacaatagcagaaaagatgtggggatttatagaaggtttcatcagaacctgtattgaaaataatcaaaatacaattttggaaggctgctattttccgtgtgaaaaggttaaaaaacttttatgtgatgatttaactgttgtttttattgtattgtcaaaacaatatattattgaaaactttgataagataataaaatacgaaaatatagtagaagatagaaaattcccggagagcagagaaattaaattttttattaatgaaaatgagagactaaaggaagagtgtattaaatatgaacttccatattttgagataaccggtaattatttcgaaggactagaaaagatacttgaatatattaaaagtaaagcggttaaaatttgccgttattcacataatgatattaatgaaatatgtagtatgttttgcaataccgtgaaacatataaataaaagagattataccgcagaacagattgccgcttggatgggcggtatagataaagataagtgggacaaatcattatctgagcatttttctttagaagtaaaggtaatggggaagattgccgcgtttggagatatagacggagaatatttggatagactgtatgttcataaagactttcagggattgggatacggaaaaatcattttggattcactcgaagagcaagctatacagtcaggatttaaaaggatttggacatgtgcgtctataactgcaaaaggtttttttgagagatatggttataaagtgataaaacgtcaacaagttgaaagaaaagatgttttattgactaattatgttatggaaaagcattttgaacaggagtaaagtaatggaatacaattataaatttaaaaataaaaaactatttgatttggcaatgacgcatatttcacttgccaatgaccttcatatagaaagcaatcagcggcttgaatttttaggtgacagcgttctctcgtttgtggttgctacttatatttataatgaatataagaaggtggacgagggagtattgacagaacttcgcgcaaatgcagtgtgtgaaaagactttggctattgctgccagaaatcttaaacttggagaggatttaaagtttggaaagtctgaacgtatgtcaggcggaaaggataaagattccgttttggctgacgcatatgaggcgttactggcggctatttatttagacagcggaatagaaagcgcaaaagactttattatggatacaataggcagcatgataggcgatacttcttatgttgaactggaaaactataagtctgaaatacaaagttattatcaaaagcgtgatagaaacagagaagttgttaagtatcgtttggtaaataaaaatggacctgaccatgacccgacgttttttgtggaagcgctgtaccgtgatgaagtaatcggcaaaggcgagggaaaaaaccgaaaaagcgcagagcaggaagccgcaaaagctgcgcttgctaaggttaagggaagtaaggaatagctatgcgaaaatataatatacctatttttattcctcatgaaggatgcggacatgattgtgtgttctgcaatcaaagaaagataacagggattcaaagttcggtttctcctgataaagctaaagaggaaatagctcggtatctttcaacaataaaatctgaagattgtcagattgaaatagcctactttggaggaagttttaccggtcttgatatggagctgcagagagaatttttgaaggcagcttcgggatttaaagacgaacggataatcggaataagaatgtctaccaggcctgactatataaataaagaaattttagagcaatgtgtggagtttggagttaaaacaattgagctgggagttcagtcagccagtgacagagttatcgaactaaacagaagagggcatgtttttgaagatgtaattcgtgcggcggaaatgataaaatcattcgggatagaacttgggcttcagatgatgctgggaatgtatggctcagatccgaaaaccgatattgaaacatgcaggaaaattatagagcttgaacccaaatgcacacggatatatcctactctagtgcttagcggaacagcgcttgagagtttatacatccgcggagaatacataccatatactcttgaaactgctgtcagcactgcgaaaaggtgtttgctgatgtttaggaaagcaggagtagaggttattagaattgggctttatccgggagaggacttgagaagcgaggggaatattgtggcaggcccttttcactctgcatttggggaacttgttgaaaacgctgtatacaaggataaaattgaggaagagattatacagaagagattaagggactgtgattatgagataatagcgccgtcttcagatacatcaaaaataattggacagaaaaagtgcaataaggagtattttttaaaaaaatacggagttagaataaaagtaaaaaccggttagggtgaaattatgcttgagatggagatgaaagacgcctttttttggtatttggattcaaaatatgagaaagtaagagttatagaggaaaaggtaatagggaaatcgcgtgcggatgttgttgcggttttaccggatagaataatagggtatgaacttaaaagtgacagcgacagttatcagcgacttttaacacaggttaaagactatgataaattttttgatttcaattacttagtggttggagaaagtcataaaaaacatgctggtgaacatgtgccggaacactggggtattgtgacagtatcaaaggatacgggagtaaatattatgcgcgaggccgaacataacaaaaaagctaaaatgcgctggcagctgtcattgctgtggaggagcgaacttctaaacattcagctcgagaacggactgcataaatacagtcaaaaaagcaaatattttgttataaaatatttaatggaaaaagttgaaactgaaaaattaaagcgtcagatttgcaatgaactttttgagagggactatacattgctgtcagaataacaagatttatattaaacaggataggttatataacctatcctgttttaatattagtattttaaagtagtttatttaaactctttgcctacagcaaattttatcattgcaataaaggctgaataatctttactgtcacttactttggtaaaataaccaattgtaccgcggctgttagtattgataaagcagaagaaccaagagtctgttgtcagaaaatctccttccatagtataacattgacggttgtctgaagaatcagctgtaagagcgacgcatttgcattcaatactgtaggtactgtcagcgtctttgaatatgataactgctgctttagttgaattattaatactttctattttaatttcttcgactatatcttcaaaatctaaatctgccttagtaataatatttttatatgcgttatacattacatctaaatcgggagcatcttctaaaaatgtattatcaattatgtaagttgattcggattccagctgaatgttaagaatagcacgttctactgccaaataccattcattttttatagtgttctttaactcttccggtttttcgtttagatagttataaaaattatttgtattataaagtaaatatggaagcaatgtctgttcatatgaatatctcaaattttctgctgagtcttttagctttttcatgtcagagtcagttaattcacttgctttaattgacccttcagttgaagtgccaggagttggtttagtaactgcagcagaagtcggttcaggaattggtgaaggagtgttttcagatattatagctgtgggaaccggagctgttccggttataataacttgttgtgtttcttctatccagtctacagctgcatcaaggctttctgaaacggcacgaataggtactaaggttctatcttctatcattctggcgggaacatctaaaattatggattcctcatttttgtacattatattgctgtctatagttattttaatcgtattgacatcttttacagctattgcggtttgcgttgtttcatcccaagttactgttgctcccaaagcttcaaatatagcacgcattggaaccaaagttctgtcattttcggtgacaggatcaacatcaaaattaatttgttctccgtcaacaaaaacagttattacatcagtggatgcaaaaatctgaaatgacattactgccgtaaacagtgcaaaaattactgcagcgacagaaagttttttaaaattctttttcataataatccctccgtttatagtttattatattataaatgaaatgcaatattttgtcaaatattgtaatttaatttaaaaataataaaaatagtatagaataaattttaaatataacttaattataatattaataagaaatgtgtttctgataaatcttaatccttattcttgtcaaatgaattttgaatttaagttgaattaactttatcggtatggtacaatttagtaaatagaatcgtgttcttaatatataaattataagtatttaagactcttataaattgttttataagaaaggtggagggagctatgcgaaaaaggggagtattattattttgtataataattttttccatagtatgtactgccgtcctgcctgtgcgggctgacggtgaaaaagtgcttgcttttcccggggctgagggcggaggaaaatatgcaatgggagctcgtgcctcagaaaacccggaagtttaccatgttaccactttggaaagtacaggtccggggtctcttacagaggctgtttcaaagagcaacagaatagttgtgtttgacgtcggcggtacgatttcttatgataaatggaaacagcttcgtatagaaagcaatacaactattttggggcagactgcgccgggggaagggattacaattgaaggcactgatttaagtgatttcgccgggaagtcaaacataataatacgatatttaaaaataagacccggtgatagattggaaaaagaggtagatggcatatcaatgcagtatgtcagcgacgttataatagaccattgcagtgtaagctgggctgttgatgagcttgtctcggtttattcaggaagttccgaaaatcaaagatatgagcttgggaaaaatgttactgttcagaattgtttgatgagcgaagcgcttaatctttcccgtcaccaaaaaggcgagcatggttatgggtcaatttttggaacagataattccacgctttaccataatgtttatgctcacaacaagtcccgcaatccggctatataccgtgaaattcagaatgttaatgtagccaataatgttatttacgactggggcgggacagcttcgtatggggggcagcctcattcaataaactatttgacttttaaaccgtgtacagtgaattatgtaaataacttttatagatggggaccaagctcaggtgcggaggttcgaaatgttttttacaatattgaaaacgagactccggatatatcaaagtcaagtttctatttcagcggaaacgtaattgatggagttgatactattactaatgataatcttatcggagttacaaatctgaacaacgctgtgatcctggataaaccaattgatttgggtgagtatgaagtgccgcaggagactgcttttgatacatataattctatacttgatactgtgggcgcttcaattccaaaaagagatgctatagacgcaaaagttataaccgatataaaaaacgggacagggcatattattaattctccaaaagaagttggagggtatataaattccgaacctgtgtatagacgttttgagatttctcaggactggaaagagaaaaatggaatgggcagttatgcagaaagtgatattgtttcggaaggaaaatggaaaggttatacttggattgaagcatacgtatataatatggatgagatgagcgggaggcctacaaatcctgatgttgttgtacagtctcctgcaatagcagcgaatcaggataaggttatgggactaacagttgataaaggtgaatggaaagttataaatgaaggtgaatcgtttaattattcagcagttgcctttcctaaatcaggcactcaaataacaaaaattgagctttacgatggtgatatgctcatagatacagttgagtcggataagatagaggttgatatttttccgtcaagcggcgttcattattatacctgccgtgcgtataacggtaaaaatgagtccgcaaactcagcaacggcgattgtttgtgtaaatcctgccggagtagtgcctgaaggatttaaatatgaggttttaggaaccaaatggtataaggaatctgctggagcgtctatggataaaaacggtattatcacggtaggaggttcaggcagaataaaatctaagaacagctgcgggtttttataccgcgctgtcagcggagatttctcggcggttgtaaaagttgaggatattcctaggtataaagacagaataagagctgggcttatgctgacagataagcctgctgataattcaaaacttgctatgatttctgacaatttggacagaatgggtgagaatatttctattattaccagaaaagttgaaaaagagaatatagctcaagtttatatgcgtaataaaaatggcatggaaatttcaaattcagattcagattataatactcagcttgaccagtataggatacctgaatatttgcgcatagagcgccgagacaacctaataaaattttcagtatctgatgacggagctgattggactaacaatccgaggcagccatatgagataatgtttgagtctctgcctgaaacattgtatgttggtttaggagttgagtctaatccgggaacatacccaaaacctctctattcaatggcaaagttcagcaattttaaaattatagaatataataagcttgctgaaactgaacgctgggaaattgaagatgttagagataatgttgtaagcatatcaaataagttgaacgagggtgaaataacgcctgacggaaaacatattaatgtttatgcagctgtgtatgatgaaacggaatcaggatgccttcttaaccagtgtgctgtaggttcgtttactacagacaaaaacttaaatgaatatgatgtacggcttgataccgggagcagaatattagatattagtaaaacaaagttgtttttgtgggatgacaatatgagacctgttcagctatttcaacaacaggattcttaatagattaaaagcacttatagaatttatttattgattttgagcattatattttggtttataaaatcttcatttattgacctgattatggaacagttgtaaaatatattaaaaggggaagtttgtatgaggccaaaaagaatcggaggggtaaacccagctattcaattaataatggcagtatttctgctggtagtcggaattcttatgataacggcgcctgagtcttttattcgatggctttttctaattgtatctgttggcatggcagcttttgggtttatgtctttgatttcggctgtatttggaaaaaatggaactagacttggatcgcttatttcaggtatattgtatatagtaatcagtatagttattttaactcaaaaagatttttttcaagccgctgtcagcagaatttttagtttgctggcactggtgcaggcggttacaaatttaataagcggctttctgctttataatgataaagtgtccggatatataagaaagtttttttggggtatagtggcgtttggattttctgtattgttgttctttgacccacttggtcatattagggcagtcgaacttatttcagggatttatctgatagtttttgctgtatcaatggcattggagtgtatagatagttttcttgaaactgattatgcaaataaaaaggtaaagcccaaaatatctcttgcattaccaatagtttttgcggcttttattccgtcaagagcccttaaatatataaatgataagctggaatccggacagatggaaaaggcaaagttttcaaagcctgaagacagttatggcaagttagaaatttttatacacttaaaacagggattgatagaaggttttggacattgtgatttctgttttgacggaacggtgtactcctatggctgttacgaccagcactcgcagaagatgggcggttttatctccggcggaacagcttctttaacaaaaagagagccatatattgagcattgtatgagctatgaagaaaaaatgctggtgggattttcgctggacctgggccgagatgattatatgaatcttaaacgtgagatagataggatgctaaaacaaactgaagtctgggaaagcgacctccaaatcgcagaaaaagagggccggccggcggaggaacagaaaaagtgcaatgatccggcaagcgagctttaccgggcttccggtgcttcatttgttaagtttattgatggacaatataaaacttattttgcattaggctctaattgtgttatgtttacatacgatattatgaaaaatgcaggacttgatagtttggctttcagcggagctatcacgccgggaacgtatatggctcatcttcaggatttgtatgaaatgaaaaacacaatagttactgatatgcacgtatatagttatggtaaaacaaaaaactgattttttgtaggacaaagttacttttttatgacaaatttatatattttatttacataattgcaaaaatgagatatactactatatatagtggtctgaatggacggattttgatgtttttacaatggattgtggctgcttttgattaatatttaaggagggctgtgtatgcgttgcatgtattgcggacatatagacagtaaggttgtggattcccggtcaacagatgatggcacggcaataagaaggcgaagggaatgtttaaactgcggcaagcgttttactacatacgaaaagattgaaagtgttcctataatagttgttaaaaaagataaatcaagacaaagttttgatagggaaaagctggaacgtggaattttgaacgcctgtgccagccgcccggtgcctcttcagactattgattctatgattagcgacatagagagcgcgcttcataatactttgcaaagagaagtttcaagtgaaaaaatcggtgaaatggtaatggagcgtctcagagatattgacgaggttgcttatgttagatttgcgtcggtttataagcaatttaaagatattgaaacttttcaggaggagcttaaaaaactttctcagaacaagaattgatatattgatttaacataagcagtatggtgaaaattatatattttgataaagcctgagtgaattttactttataacattcaggtttttttgtttgttttattgtaattataatatatatttatgttttttaggaaatttactgattgactaatcgtatacaaaaatgctataatacattatatataatagattgaaaggtgatggatggaatgaaaaagaaaagtatgagttttatttgcactttattttgtttattattggggattgttatattccttggtatgtctttatgcgtatatgctgaaggcagccgtgatttaataaacagcgccgcaggtcagggggatagagcgtacatagagtatcagggagacaatatgctgagcgttggacttcagcggcagcaatatgtaaacgtatatatgttttccggtgagacagcgtattttggcagcagtgttgctaaagcaggttcaattgaggtgacagacccaaaaggtgagaccgtattatatgatgttaacgcggcgggaaatggatttataggaagcacaactagtgaggcggcaggtccgaattataatggtttaatttctggcggatataatcctatttcatttgttgctgatagaaacggtatatataaatttatattttacagcagtaattatagttcttcaaaacctaataattctactaatcctacagcaacaaaagtttctgacgataattttgttgctaatcaaaaagacgccgctataggagcatgggatgttaccgttgttgggacagcgggagacggtactgctgaagtaaagaacggcagaatgtatgccgactatttgtcgttaaacatgggggcaaatgagcgcagcctatattcaaaagtctatgttttaacatctgatggatatatatattatacagactttaacggaatagacccgtttgggtttacatttttcggaaataacagaggtcttgtatcatccagaaccaatatgtcgctttatcattcaatggaggatgcgatcacaagcggtaatacaccggacctgaataattttagagatataaccgacaaaaatggagcaaaggacgggatgtatctgccgggacccggcaatacctcgacccagcttgattcctcgtttaaaatattttttaacgaaccaagcggtgagcttcctgatagtataaagccggcgcctcagccgcccggaactattgattatttaaaatttgaaggaagcgtgttagactcaaatggaaatataatcgaaaatgaaggctatgtcggaggcggtggatattttattataaatgccagcaaagtttcaaactttgaggttaaaattgatttgagcaatatatattataagacaaatacagaaggaaaaatagacgaaaataattttatatatgaatatcccgtgggcagcggaaattatatgagtatgaaagatgactctacggttgttattgataatatatcagaatatattaatgcgggtacagtagtaatcggaaactcttgtgtagaggggataaacagaatattctggaatggctgtgatgaaaacggacgtgttcttcctgccggaacttactttgaggcgggaaagggaaacgcggtggcgattccaaaagccggagaatatcacttccctctgatagatgttgaaaacttgccgaatggtctaaagattacccggctgaatactccggatacctttagtaaagaacagagagattttgtagataatcataaatcttatctatattataacaacattgaaaacagtgtgttgagaaccggaaattataatggcgttgaccgccaaaaaatctggactgttgcggataagcttaataaacgtttcggtgtgaacacggaggcgagcggcgcctgcattgtgacaggcaggagtgctgataaaacagtgcttgatttttggacagacttgcgattgtctgatgatgccggaaccaagagtaatcctgttgaattaatagacagaaccgacagtgttgagagcatgcttcttgcaggatttacattctttgattatgacttcagcggaacttatgatatgttgacaaacgactatgctctgtcaaatgtcaaggtcgaacttctggacaataatggaaacagtattgcggagacggtttctgattccagaggtttttatacctttgttgttccggataagtcggcccaatatacaataaaagtaactcttccgaatgatacatatttctgtacaaccgcaaatatggaacaaagtacagttcctcaagatatagtggttgggcaaaccgcttcggttgaagacgttggttttctggctagagaggcaagcccgattcgtataaataaaacctgggcagtgccggatgaagaacagccaaaaatggatgtagaatttttgattgaaggccgggatcaaaatggggacgaaaattcaccggtgctttattcaagaactgcagttgtaaaggattctgagggatattcaactttggttgaaggtcttccggctgtaatatttgttaatggaaacgaggtagacttaagctatactgttaaagaagtgacagatataccgggatttaccggcactataacttctgagaccggcggtcttgtatgggattgtgtgaataaacctgaggatattagttttactgttgaaaagacttggtcagtcgcatcgaattttactaaaccggatgatataactgtcagtttgatgaagaaaaatgaaaaaggtgagttagtaaaagttgatggtgttcaggatcagcctcttaataattcaaataactggaaagcgacttttgagccggttccaaagtatgaggaatacgttgaaaatggggcagccaaatacagagcaatagactatactgttgttgagaacaatataccaagcggatttgcagcgtctatacaaaagtctgctatagaaacaaaaacaaatacttttattgtaactaatactgctgaaggttcagttaaactaataaaagtagataaggaaacatcttcacctctgcctggagccgagtttaaattggtgcagcttgatgaagacggtattagttatcttgacgttaataaattaaagccggtatatgattctttaaatgaaatcgaaaagtatcaatacgatgaaaattcaactatcgataaattagttacaaataaaaatggtgaaattattgtagaaaatttatctatgggaacatataatttcattgagacaaaggctcctgagggatatattactcctgcagaaaatgaggcgaagtcaagtgatatggttcttggcagcggagtaaattcatctcaagtgaaaatggaaaactctttaaatatcactccaactccgatacctacagcaacatcggcaccgacagaaactccaatgccaacggcaacagcgacacctgagccaacagcaacggcgacaccggttccaacggcaacagcgacacctgagccaacagcaacggcgacaccggttccaacggcaacagcgacacctgagccaacggcaacggtgacacctgagccaacagcaacggcagaacctgagccaacggcaacggtgacacctgagccaacggctacaacagaacctgagccaacggcaacggcagaacctgaaccaacggcaacggcagaacctgagccaacggctacaacagaacctgagccaacggcaacggcagaacctgagccaacggcaacggcagaacctgagccaacagtaacagcagagcctgagccaacggcaacggcagaaccggaaccaacggcaacggcagaacctgagccaacggcaacagctggaccgcagccgggcgatattgtttctataaatgtatcaaaaatatgggaagacgcagaaggcaccgcgagtctaactccaccagcggaacttgatggaagtcaaatagaaattgttcttattaaaaacggagtaagaactgagcaaagtcttgtattaaacaatgaaaacggatttaatggaagttttaataatctcaatagatttgatgaatcaggaaatgttatagactattcagtccaagaagttaacgctccgtttggttattgtgcattctatgaaaatgacggaatcaacagctggaccgttacaaatgcacaggcgaatattacaggaaaggtattctatgatgctttgaataacggtgtttatgatttggataccgattcgtttattaagaatgcaaaagtagttcttgaggatgaaaatggaaatcaggttggagaagctgttttaactgatgaaaacggatattatttctttagccgtgtaccggtgaatgatgatggaactgaaacaaaatatacagttagggtcatttcccctcttaatgatgtgaagtgtaccacaactgagaccggaaaccagactgaagaaattataggcggttctttaaatgtgacacagagcgttgcgctctctaagacagatatgattatagacgcttctgacacaggtctgtatggagatgttaaggatttagaggaacagaatataaacgttgcggttaaaaaagtttgggaagataataataaccgtaagggtaaacgtcctcaagaattggaagtatattataccttgaaaaacaaagagggtatcgttataatttctaaaactttgattctgaatgaagaaaacaattggcaggaagagtttataatgccataccgtgcaattgaagattctgaggttgtggagacccaagttgacggatataaggagcccaaaataacaagtacagttgataaagagagtgaaaagtttattataactgtaaggaattcaattgtttcaaattcaagttcaggcggcaatggaggcaaacctactgtaggaagcacgggcacagagacgggcgcaccgtggccgacatctactgctaaaccgaatccaaatgtatcggcaactcctaaaccggagattcctgaacttgataagacgaaccattacgcttatattatagggtatcctgaaggcgatgtaagacctcaaaatgatatatcgcgcgatgaggtagctacaatattctttagaatgctgacggatgattcgagaaatgaattttggatgattacaaatccatatactgatgttccggcagacatgtggtcaaataatgcaatatcgacgatgtcgaacgcgaaaatactgaccggtgacccggatggaaaattcagacccgttgacagcataacccgtggcgagtttgcagctatagctgctagattcagcagtaaagagtataatggcgagaatatgtttactgatataatcggtcattggtctgaggaatatattaaccgtgctgcacaagaaggctggatttcaggttatccggacggaagcttcaaaccggaccagtacataacccgtgctgaagcgatgactcttgttaacaacattttaaaccgtcacgccaaagagagcggtttgcttaatgatatgttgaaatggccggataatgtgcccggagagtggtattataccgctgtccaggaagctacaaattcacattattacgaccgtgacagcgacggatataacgagacatggacagaaatcagagaaccgcgcgactgggttcagcttgaaaaaacttggtcggacgctaacagtgccggcagtgaagattcggtttatagcggagagtaatatttaaaataaattttctgcaataaccgttttggaaaaaaataataaaacccttgacaaaaggggttttgagtgttatcataatagaagtaaatgatattgggcagaagagtgagggaaacctcactcttttgcattgtattatcaaagttaatagttggtattgagagttcagagaggagttgtggttttgggagcgatgacgttttcaaagattgaaaagattatattcgaccttgcggagccgatagctgaagagaatgggctttatatctatgatgtagagtttataaaagaaggcggacattggtttttaagagtgtatttggataaaccggaagaagatgagtatatatctattgacgagtgtgaggagttctctagaaagctcagtgacgttttggatagaagagaccctatatcgcagaattattatcttgaagtttcctcaccgggaatagagagaaaaataagacgtgctgagcattttgaagccagcaagggcgagattgttgatgtcggtctttacaaagcaataaacggcagtaaaacgcttacaggtgaacttatgggtcttgatgacgaagataatgtgcttttgaagatagacggcgagactgtgaagatacctatcaaacagactacggttattaggactcattttgaattttagtctttgccgagctgtttaaaattaattaaatatgtatatcaaatttcacatattatatagagaggatgtttaagaaaaaatgagcgcagagttgtttaatttgttggacgagatagaagaagagaaaggtataagtaaggacgttgtgctggacgcgcttgaaagcgcgctgatatcggcatacaaaaagaattttggcgcggttgaggatataaacgttaaattttccgatgacggtgatataagaatttttgccagaaaagaagttgtagaagaggtagaggacagggaaacacagatttctttggaggacgctcaaaaaattaaaggtgattataaggctggagatgttgcagaatttgaggtaacacctgattcattcggcagaatagccgctcagaccgctcgtcaggttgtttttcagagaatacgcgaggctgagcgtgagaaaatggtagatgaatacagtgaccgtgagaatagtatcgcgagtgctattgtcagaaaaatagagcgcagaaatgttatgcttgaaattgacggcgccgaatctgttcttatgccgaacgaacaggtgaaacatgataactatagagttggtgaaagatataaagtatttgtcgttgaagtagctgatagtataaaaggcgtgcatttggttgtttcacgttcgcatcccggtttggtaagatgtttgtttgaacttgaggttccggaaattgcacagggaataattgaatttaaaggaatttccagagaggcaggttcaaggtctaaaatcgctgttgcttctactatggataatgttgatcctgttggaacttgtatcggacctaagggaatgagagttcaaaatgttattgatgaattaagaggagaaaaaattgatataatcagatatagtgatgatccggcggagtatgtttcaaacgcactcagtccggctgatgttgtatcgatagaagtctttcctgaaaataaaatgtgtaaggttgttgttcctgaaagccagctgtctttggctatcggcaaggaggggcagaacgttagattagcggcaaggcttacaggttggaaaatagatttgagttctattccggacaatgagataaagaaaggtgataaaactctggaagctgcttttgagcagttgggaaatgagcttttaaccgaagaggatatggaaaacgaggtttcggagattttgaacgacagttattgagtttattatattggagggaaatatgccgacaagaatgtgcgcagtttgcagaaaacgttttgaaaaatcagaactgaacagagttgtattgtcagagtcgggtgagattttttatgaccgtacaggaaaggcccaagcccgaggtttgtatatttgcagagaatgtgtgagagaagcggaaaaaaagcgtgtttttgagcgtgaatataagcgcagagttgagccgtcggtctatgagagatttgtgtcggaggtggagtccgggtgagtgatgaaaaactattgcggtttattggtcttgctatgaaagccggaaagcttatgcttggagacggcagggctgttgaatctataaggtcagggaaggcaaaattagttttaatttccaaagacgcttccgataatactaaaaagaaatatagaaatatgtgtgagtatcggaatcttaaattattggatatattttccgacagaaatgaatttggtcagtgtataggcagatattttgcggtagtggccgcagttgaggacgatggattcgcaaagagaatcgttgaacttgcagaaagggttgatgaataatatggaaaaaatacgagcttatgagttatcaaaaatatttgggtttcccagtaagaatatagttaatgttcttcatgaatatggggtatcaacaaaaaatcatatgagtgctctgtcagagtatgaacttgatgttatttttgaatactatactcagaagaatcaagcaaaggatttttctatctttgataaaaagaaagaagagccaaaagaagcagctgaaaatgttagtgataacgaagacttcactccggttccggaaatagaagtaggcagaaagctgcgtactgttgatacgcgcgtcaataatgtggatcttgaccgtattgatgatgaaaaaattgaggagcttattcctgaaaacgttaaacagggagataagaagcagaaaataaatcagaaaaagaaacagcagcagagacagcagcacagcactaaacaaaaacgcaaacctgaaaatgttataaaaaaggttgaaaagaaagaaaagaaggttgagccgctcaatgtgctggtaccaaatgaaataaccgtaggtgaactggcttccagaatgaaaaagtctccggcagagattataaagaagctgatgcttttgggtattatggctactgtaaatgaaactttggattttgacacagcctcacttatggtagaagaatttggcggaatcgttgaaaaagaaataattttaacggatgaggaaatactatttgatgactttgaagatacagctgaacagctcaagccgcgttcaccggttgttgttgttatgggtcatgttgaccacggtaaaacatcacttcttgacgctatcagagacacaaatgtgacagagggagagttcggcggtattactcagcatattggtgctcacagagtacgtgtaggagagaaaaagattacgttcctggatactccgggacatgaagcgtttacggctatgcgtgccagaggtgcgcttgttactgatatagctatactggtcgttgccgcagacgatggaattatgcctcagacaattgaagctattaaccatgccaaagcggctgaggtttctatcattgtagctattaacaaaatagataaggacggagctaaccctgataaggttaagcaggagcttatggaacacggtcttgttcccgaggaatggggcggagatacaatatgtgttgaggtttcggcaaagaagagacagaatataaaagaactgcttgaaatggtactgcttgttgctgaaatgaaagagcttaaggctaatcctgacagaaaagctaaaggaacagttattgagtcgcagcttgacaagggcaggggttccgttgctactgtgttggtacagaatggtactttgcatgtcggcgactatgttgtagccggaaccgcgtcaggtagagttcgtgctatgaacaacgataaaggaaagtctgttaaaaaggccggaccgtctatccctgttgaaattttgggattgtctgaggtacctgagggcggagacgaattttatgttgttgaagatgagagaaaggcccgcagtgttgttgagaacagaaagttccaggagaagaaagaaaagcagaagagcgctacggctatatcgcttgataatttgtttgagcagattgaagccggcaagatgaaagaccttaatatcgtcgtaaaggctgatgttcagggaagtgttgaagctgttaaacagtctcttgagagaatttcaaatgatgaagtccgcgtaaacgttatacatggtgcggtcggagctatcaatgagtctgacgtcatgctggcgagcgcgtccaacgctataattgttggatttaatgtccgtcctacaaacggagcaagcgatgctgctgaagacgcaggggttgaccttcgtatgtaccgtgttatatatgacgcgattgaagatattgaaaaagctatgaagggtatgcttgagccgacattccgtgaagaagttaccggccatgtagaaataagaaccacatttaaggtttcaggcgtaggaactattggcggggcatatgttttggacggcaaaatcagaagagacagcttggtgcgtgttgtcagagacggtattgttatacacgaaggtgagctgaattcacttaagagatttaaagatgacgttaaggaagttaacgcaggatatgaatgcggtcttagcgtcagcaattataatgatataaaagacggagatattatagaagcatatattatggcacaggttgaacccgaataatctgtgccgtaaaggctcggataagaggagatatttatggctaattacagcagaaccgacagggtttcagaagagataaaaagagaattgtcagcaataatacgcgatttgaaagacccgcgtctgccgcagatggtatctgtggtttcggtgcgcgtcacaaaggatttgaagtttgctaaagcaaacatcagcgttatgggtgatgaaaaaactaaaaaggatgcgtttgcagcgcttaaaagtgcggccgggtatattaaaaaagaggtcagcaagagattgaatctgcgtcaaacgcctgattttacttttgttgaagacgatagtattgaatatggagcccatatagaggagcttttgaaaaatttatagttgtgaactgcactaggacagacgtatgaaaagaggtactatatgtttgaaaaactgattccaataatagaaaaggcaaataaaattgcaatattcacccacactcatcctgacggagatgctatgggaagttcttatgcactaaaattggcgcttacgtcaattgggaaatgctgtaaggtatttttgcttgatgaccctgacgcttccgcattcggactgattattaaaggtgatgatattgaactgtcacttgaggattgtgatttagccatagcgcttgactgtgcggactctaaaaggcttggaatgtatgaagagccgtttatgagtcatcctaactcgatagctatagaccatcatgttacacatgttgaatttgctaaatcggggactgtgtattctgatatttcatctacatgtgagctgatgtttaatctatttaaagaaatggatatcagtataaataaagaaataggaaataatatatacgtcggtctggcgacagacacaggcaattttaagtattcatgtatcagcggagataccttaagggcagcaggagaattgatagatttgggtgtggattttgcgagcatatcaaaggctgcatttgatacaaagcctaaggcgtattacgatttaatggggattgctataggaaagctgagaatggtatgcgatggcaaagctgcagcgctctatttggaatctgaagattttaaaaaagcgggaataaaagaatcagaggccaatggtatagttaatataccaaacagtattgaaggagtagaggttggggcgtttataagaaagcgtgacgatgatgaatacaaagtgagtcttcgttcaaataaatatattgacgtttcagaaattgccgctgagagaggcggaggcggacatgtgcgtgcaagcggatatagtgtaaccggaaaaactgtggatgagataattcaggatttagcagagggattggataaaagatggcaggattaagcggtattataaatgtttataaacctaaaggtatcacatcccatgatgttgtttataagcttagaaaaattctgggaattaaaaaaattgggcatacgggaactcttgacccagatgcagaaggtgttctgccaatgtgcataggcagagcgacaaagactgcggatatgctcaccgctgccgataaggagtatatggccgaggttacgcttggtttctcaactgatactcaggattcatcaggctctgttataaaatctgttgatatggatgattttattgttagttctgacgacgttgaaaacgcagttactaaatatataggcgatataaatcagcttccgccaatgtattcagctataaaaattggcggtaaaaagctgtatgagctggcaagacaagggcttgagatagaacgcaaacctcgctttgtaaaaattaacagtattaagcttttggatttttatccaaataaagaacatgtgatgaaatttaagatgcttgtgtcatgttcaaaaggaacttatatcagagcgctttgtaacgacataggtgaagatttgaagtgctttgcgcatatgtcaggacttgtcagaactaaaagcggcagatttgatttggagcattcgtataaactgagtgaaatagaaaacatggcggcaatcggcaatatgtcgttttttacacctgtagacgaggtgttttccgagtatggaaaactagtactatcagataatgctgcctttaagatgtgcaacgggacacaggttaaaagccctgctgaagcaaaagacggcgttacatatagagtatatgatattaatggtaaatttcttactatctcacgtgcggagaatggaaaaatgaagatattaaagacattttatcaggattaattggaggtgtgagcgtggagtattacgcacaggatgagttgttcaacaagcatgatttggataatctgcagctgaaaaatacagctgttgcgctgggtgtttttgacgctatgcacttaggtcatcttgagataatagatgatgttgtaaaatatgcaaaggaaaacggtcttaaatcagttgtgtatatgtttcgtaacattcctaagagtgttattactaatacggatataaaaaatgttaacctgttcaaaaagagactacatattctctatgaaagaggggttgatattgttgttgccgagaggttcacatccgagtatatgaaaatggaatatgcggattttataaaaacttatctagtggaaaaattcgacgctaaatatgtttgtgcaggatttaattatcactttggatataaggggttggggaatacagaatctcttaaagaactctgcggaaaatatggcataaaggtacatattgcagagtgtaaggctcttgaaaaacctgtgtccagcactcttttgagaaaacttattgcttcaggagagatggaggaagcagcaaaatatctagggcggcagttttcggttaccagaaaggtagaacatggagaaaacatcggacataagctggggtttcctactgccaatatacaacttcctgattttcatgttgtacccaagttcggcgtttatattacaaaggcgaaagttggcggaaagtggtataaagctataacaaatgttggaggaaaaccgacagtcgggacaaataagccatgtattgaaacatatatgcttgactttgaaaacgatatatatggagaggaaatagaaatagagttttatcattatttaagacctatttccaaatttgaaaatattgaggctttaaaaaaacagttggctcaagataaagagtcagcaagagtttattttaatgaaaaataaagttagctgaaagcggaaatagactgcgttatatgcagtgggtttcgctttcttttttggggagtaagataatgagtgaaaaagtaaataaatatgaaatggacatgtgcagaggtccaattttaaagaaaatgctgatttatgctattccgctaatgtgttcaagcatacttcagcttatgtttaacgctgttgatatcgtcgttgtggggaaatttgccggtgataattctctggcagctgtaggttctaatacttcaataattggtctcataaccaatttatttgtgggtctttcagtagctgctaatgttcttgtggcaagattttatggagcaaaggacgaaaaggctcttgaacagactgtacatacttcaatgcttctcagtcttttcagcggtataattctctcaataattggagtagccggcgctaagtggatattggttttaatgcagacgcctgaagatgttcttccccttgcaacgttatatcttaggatatattttcttggaatggctgctacgatgatatataattttggaagtgcaatcttaagaggcgtaggggatactaaacggcctttatactttttgtttggagccggaatagttaatgttatattaaatcttttatttgtaattgtatttcatatggatgtagctggagtggctattgccactgtaatttcacaatgtatatcggcttttttgatagttcgttgtctgatgaaagaaaacagcggtatacgtctcaaattgtctaagcttaggataaacaaaaataaattgctgttaatttttaagataggactgccggctggttttcaaggaatattattttctctttcaaatgtggttattcagtcgtcaatcaattcatttggttctgtggttatggcgggtaatgcggctgcacagaatttagaaaactttgtgtattttgctatgaatgctttccatcaagccacagtgacgtttacaagtcagaattatggtgctctaaactataagcgaatcaatagaactgtgattctaggtgaaacatgtgttgctatagtcggaattgtactcggaaatttacttgttctatgcggcggcggacttcttggcatttatacatcaagcccggaggttataagcgcaggaatagacagacttaatatagtatcgagaacatatgctttgtgcggaatgatggatgttatggttggtgctttgagaggtattggctattcggttataccgatgatagtttcattggtcggagcgtgcggcttaaggctggtttggatagccgctttgtttggaatagagcagtatcataatgtgacaacggtatatttatcatatccggtttcatggcttttaacttttatgatacatacattatgttttgttttgctaaagcgtcatttagaaacgcatatgaaaaaattcggagcaggatattaatcgcgtaaaaatatttttttgaatgattgtattattataaaatggtatttatatattaaaattcattaaagttttactgattactgttttaaaaatactctgttaatttaactttaaaaagtttattttctattagaagccttttttcggaaatagtagatataaaaattgggggctatacaacaggtgtgtataatgattatgatagatttttgattatagtataatttataataaaataatatattatactatatttttggtatcatttaaacagatcggtctgtcaaatagactgatctgtttttttatgcaatttatcctctaacgctttttatgaaactgcatatcttatattgtaagagttttatttttattaaatataaattaggaggaatcactttgattgaagcagaaagattagtgtcttcacgcccgtttattatgtattcgggaacggatgtcagcggaaccgtagggggtaatccgagtgttcaaagttactgtggcttggattatacagccgcgtcccgctatcgtttagacagacctgatcataatcaaatatttcaattttttggaaatatattaggcagtcaaaataaacttgtttactgtcttgataaatttgcagacggtccatataatgacgtgccatatgagagccgtccgtttgaaacactttttccgggggcaacggagagacaaaaagaaatgttgggatggattttggcaaatacatttccggctgtgagcgcggctgctacatttgcgcttgccggagtagatccgacagcagcaccggttcttgacaataatgatgcgtatgcagccgttcaagtatcattatgggtacttttggaacagatagcgcttgatgaagttaattttttagagtgcacatcaggagaaactcatccaaaatctgaaaggctgagagttacagttttagaattgcttcgcctggccggtcaatttgttgataatgagacgctgcctgaaatatcaattactcatacagagccatgctgtggattaacctcattttttagctgctgtaataatagtactttaccgtcagacggcagttctccatatttagtttttgcgaattgtcctaatgaggtcagaacaatttgcggaaggcttctgatagggccgtttcgtgtttcatcaagtttcgcaggacagccgactataacggttacgcctttctgtaactgtggtgaagactactcggtatcatatatggatttctgtggtaatccaatttctaatcctgttataggacaggagttttatatcgctatcagaacttgcaaaagattttcgtgctttactataaccgcttcatttactggaaatattacaagagtaataactttagaaccgcagagtacagcattaaattatcagcctataggtacatcttttgaggaccagtctattacattaaatgctgaattatgtatttgtgttgagtatccggcatcatctgaaagttttgttgataatggcaggtttggtataaatataaacaataacaacaacaataataacaataataatagcggaggagggtatccgggtcagttcccttgtataccaatttgttatccgatttggcaaaatcctcgtccgccgtatccgccggaaccaccatatccacccgatccgccgtatccgccaagaccaccgcgtccgccatatccgccatatccgccatatccgccgtgtccgccatgtccaccatgtccgccggaaccaccatgcagaccggaaccgccatgcaggccggaaccgccatgcaggccggagccgccttgcagaccagagccgccatgcaggccggagccaccatgcagaccggagccaccatgcagaccagagccaccatgcagaccggagccgccatgcagaccagagccgccatgcaggccggaaccaccatgcagaccggagccgtcctgtaagtcaacttctgcttgttcttctaatccaccatataagacaactacacatattaaaaatgaaaaaacaggaagtcagattactaataaaaagcacggattttgatttacaaacaaaaaagctcaatcttaaaaagattgagctttttaattttatatgcaaataattttataatgcatacttatgtttataaaattcataatcctctctgtattcgcctggcatttcagcatgtagacgtcttaaatattcatgcctgtccaaagctctcttatcagatcttgcttgtagtatagcaactcctatgtttgaacagtgatctgaaattctttccacattactgattatttcaagaaatattacccccgcttcaacagaacatttctttgacttaaggcgtttcatatgcttgcgttctaacttttcctgaataccgtctacaacctcttcaagaggttctattttacagaccaaggatatatcatcccaagtaaatgcctggaatgtaagttccataatattttcaacagcgttaaacagaacttttagaccttcttctgcatcgggagagaattgtattttcccgtttatcagcttttcaatactctctctaatattgtcacaataatcacctatgcgctcaatgttgtttacaagatgaaaatatgctgctgatttttcattatcagactgactgagctgtgtatcggaaacttttgtaagataagcagtcagattgatttcatattcgtcaagaagttcttcgtttgcgagaattttctcagatatagacatatctttgttcttaatcatctttcggcagagcataacattttctttagctactccgcacatgtttgacattacagtatgtacattatttattgctatggatggagtagaaagaaaacggtcgtccagtaatgcaaacggactttctgtttcctcgtgttttgtatctttgattgtcttttgtgcaagccataccaatagccttgaaaatggtaaaagcattatagttgaagcgacattaaatatagaatggaaaatcgatatatctgttgcatttattgccgaatgccaaaaaggcaggcccaaggtgtattgtaatgcataaataacaaccatgaatactatagtgccaattatgttaaaataaaggtgaatcattgcggctcgtttggcgtttttacttgcgccaacagaagataaaagtgcggtcacgcatgtaccaatattctgccccattattattggaaaggcagaggaaaataccacggcggtgctggaagctacagcttgaagcatagcaaccgatgctgcgctggattgtataatggctgttattcctgttccgataagaattcctattacaggattattttgaccggcaaatacattctgaagcgatggaatagcgttaaatactacttccatagaatttgacatgtattccataccaataaatataagaccgagaccaactaaaaattcgcctatagtttttatgtttttcttttggcagaagaaaagaagccctgctcctaaaataatagcaacgggagccagcgttgtaggtttaactatggcaaggtaccaaacatctccgggcaaatcgtttaagctgagaatccacgctgttatagtggtgccgatattggctcccataataattccaacagcctggcttaaggtaagtataccagcattaacaaaaccaacaaccataacggttgttgctgatgatgattgagtaagcgccgcaacaacggcacctaaaataactgacttaaataaatttccggtaactttctccattatctgacgaagcttgtctccggcagctctctcaagaccggtactcatggtgttcatgccaaacaagaacattccaagaccgccaaatagtgagagaatttgcagcgcgatatccataaaggacacctccataatttaatttaactcaacttccaccgactataatatatcatcttatacgacaaaatacaactcgtaatattgcatatattagtgatagtatttctttaggaaatttagtaaaatttttatgttaaagaaaataaatggaaatatcgtgacttatttgagaagaatataattaaaagaaccatgtatagaaaaatacatggtcttttttttaaaatagtattattatatttgaattatagttaaatatataaaactgacataccaactccgaccatatcattgggaacatccccaattctccagccgggttcagtagtttcgatataatagtattgaattccatctaaggacaaattaccgttgcttgaagtctgtaaacctacagccatatggtcttcactcactaggagaactgcaccataacctaggagtttcagcattttagccaaaagcaccgcactgtcttcgcagtcaccgccttggtcgaatagtgtttctatcgggtatttagggtattctataactcctttgtaggttaaatcatcttgatattccaagccttgaacaaaagctgatataaatccggctatatcataagaggaggcgaatccattgtttaccgccatatctctgagagtttcagcaagagtataaacagccgtctcgtcagcctcatcctgagcatatgcagagtaattattagttcttggttttgaaacaaaatagttatagtcataatatgaaatgcttacatccagtctgaaagtttctccatagaaaggatagttccatgaatacgacaacgattgataaggtttatcctgattaagagaaaacgaaattcttaagtctgtgttgattatacgtgataccattgctgcggcttcagaacgtaaaatatctgaagctggataaaacgttccatattcatcactaccggttacaactcctgattcataaagttttaatatctcttgataatatggatttgactctctgacatcaggtatgggagatatttcattaattttttgataacagtcaggcagagctttaaataacaagtaagctaactgttctcttgatgcggggtttaagtatcttccgctgaattgatttggttctattatcccttggttaaccgcatactcaagatatggcatgaaccaagtcatatttgcctgtcggttaacggagcctacaccgtttgtatttatataaactccggtttttggggtttgcgtcatagaatcgctgtcatttatttgaaaattgccgtttccgctaataggatatgaatatttgatattgttgttatcaagtgaggcaacgcttccgccagagtttaatttgttaattgtattgccgtagtatttagcattgagtcttgaagctactgttattgcctctgccagtgtaatgtttccgtcgggtgtaaacatattatcgccggttccggtcattattccgtattcataagcaaagcctacatagtaataataccaatcgtcatcgtaaacatcagcatatgtagaagaatcataatagtttgtctgttcaaattgtggaaatatttcggcaaatgctgtagcagaaacagatgttaatatacataatacgagaatagttgaaataaattttaatttatattttatcatgacgcacctcacttatatagagtgtgattaattgtcatcgtgatttttatcgtcagacggttcgtttatttcatcgctttcagaactgttttcagtatcgggttcaaccaaagtaacaacagcttcttcaattctgtggtcagcgactttggttacgtttattttcatagacccgaaagacagctcaggcatttctccatctgcggggactgttccaagctcatctaatattaatccggcaaaggtgttatattcttcgtcaggaatatctataccaagttcttcttcaacgtcttcaatttctgcgcagccctgaataagccagctgtcgtcttcgccgggaagtttaacaatttcttgttcctcttcaggctgatcgtattcgctgtacagttcaccaactatttcctcaatcaagtcttcttgtgtaactatgcctctaaaacctccgtattcatcaagaacaatagcgaagtgagcatttttatcctgcatttgagaaaacatttcgtcagcttttatagactcaggaacaaaatatggctctcttaaaatatctctaagatttccattcctgtctttaagtaagaatttgtaaaaatcacggctgttcagaactccaatgatatcatctatagcattgccgcatacaggatatcttgtatggtttgtttcatttataatttcttcccacttatcaggaccgtcatttatccacaagataactgcgtcggttctgtgagtcattatgtcttcaacaggtttgtcgtccatttcaaaaatattatgtatcatttctttttcatcgtcatcaatggcgccgctttctgacccgatatcaaccatcattctgatttcttcctcggtgacgtcatcatcgttttcatctggccgaataccaaagattttcaaaataatttttgatataattcgaggaatccatacaaatggtatactcaaatatgttacaaagattgaaatgggagttagggctacagaaatactttcagagtattttccggccaaaccttttggaacaaaaattccaaatattaaatatactaaagttgtaatgaaagaaataattacaaaactcaatatacaagcagcaatgatatttatattaagctcggtaaagtacgaaaccagcggaatcaaatacatatatattgcacatccgcctattgagagcagtagtaagctgtttataaattgaatagacgctacaaaatcccctgagtttccatcgagaaattttgaaagccgtatggcttttttgtttccgctgtctgctagttttttaagttttgcatcatttactacaattgttgactgttcgattagagtaaaaaacatacttaaaccaaacaaaatcaaaagaatcacccataacgattgcgtagggggcaacgtgtccaaaaataatcatccttccgggcgaacataacccataataatttttattgtccatcagtataacagaaaatgcgataaaagtcaaattctatattgtaaacgtttagttaacttttaaggtatatccgttatatttataaaatctttaataattttattttctaatcctatatatctaaaacaatatttttgaaacttgaaattttaattagaactaaaatagaaatattttataaagaataagttagctaaataatacaataaaatatttttataaacataaagaagttttattacaggattgcagaaactaatccacagtatctaataaagttatagcatatatccttagaatggaacaatattaactactactttattatacgaggtgtaagatatgtcttataaaaaatataaaataagtatatttaaatgattgtattgcaagcatcggtaggtgtgaccacacttttcttaaaagtgtgtgttatatacattaacttgttttgccataacttgcgatgtcattaatatgtatactcaatgcggacaaagtccgccgcgttaggcgcgcagccgcggaaaaataataactatattgtatttaattattataatataagcaaattttatttattatgtaattatttatgtcaactcaaaattatttttgttatataatttattacaagctgtggttcacatagagccacagcttgtaatattaaaataaacattcattctttttttatatcaacaccaagatttttaagcttttcaacaaagttttcataaccgcgttcaatgtgttcaatatcatgaatcttacttgttccatcggcttttagcgccgccgcaactaacgcggcgccggctcttaaatcggttgctttgacttccgctccgctgagacgttttacgccttcaataaaagcggcgttgccctctgttttaattttggctcccatacggcaaagttcaggaatatgggcaaatctgttttcaaaaatggtttcaacgaccattccgttgccatcacttgtagacagcagtgacatggtctgagcctgcaaatctgtaggaaatccgggatatgggagagttttgatatctacagatttgggcttttggcagggttttaagtctataaaatcaagaccggtttcaaacatgaatcccatttctgttaatttagccaatagtggttttaaatgcagaggttcaatattctctgttttaattccactgcctaatccagcggcacagatgataaaagttccggcctctattctatcgggaataatcttatgattatttttgtgcattcttgtcgtgccttttattattattgtgtcacttccggcccctgtgactgagccgcccattccgcataggaaatcagctaaatcaattatttcaggttcgttggcagcgttttctatagtggttgtgccattggctaggcacgctgctatcataaggttttcggttgctccgacactgggaaaatccaaatatattcttgttccaaccagaccattttttgcggacgcttcaacaaatccatgaccctgcttgatttttgcacccattgcggcaaaaccttttaagtgaaggtctataggacgggctcctattttacagcctccaggaagtggtatacgaacatttccgaatcttgctaagcatggtgacataacaaggactgacgctctgagctttgaaaatagtgaataatcacgcaatcttttaggttttgtgatatttgctgagattctcattgaaccgtgcttgtctctataaatatcacagcccagaccttttataatttctgccattacatcagtatcagaaagatgagggacgttatctaaaactgattcttcttcggaaagaagtgccgctgccataatcggaagagcagaatttttagagccgcttatttttacatttcctccaaaattttcacagggaccgtttataatatactttgccatataaaatcattccttaacgtattatatttgaagttgagataataccggtgctttgtgggctttcacctgatatggccagtataggaacataggtttttgcagttaaaacaaaagcgcaggtcaaaattaatgatgttataagcctttttttcataaaatttcctccaaaaccgcataataaaattttaagaattatgccacaatagtattttgacctgtaacaacttttttataacttgtattttttaaataaaaagataatatttaagataataataaaaatattgttttaaaaataaaaatttatactaaaggtgaagaagcgtgttgttttatgcaaataaataatgacaacaatttgataaaaaacaataatttaaaataaaatataaagaatataagtcttagtaatacaagatattttcatacaattaaaatataaaaatgatatataattttttaaattttaaaattattttgttcaatttaattataataatataatgcaaatgtatttgcgaacttcggaaggcttgcggagcaagcacgtaaggttcgccgccatctgaccgcaataagcggtcaagataaagttagctgtttattttattctaagatatgcaattgttaaataatcattatatactcaaaccttttaattatcataataatgcaggtatgtttgcgaacttcggaaggcttgcggagcaagcacgtaaggttcgccgccatctgaccgcaataagcggtcaagataaaataagctgtttatattattctaggttatgtaattgttaaaaattatattatactcaaaccttttaattatcataacataatacatgtatgcttgcgaacttcggtaggcttgcggagcaagcacgtaaggttcgtcaacatctgaccgcaataagcggtcaagataaaataagctgtttatattattctaggttatgtaattgttaaataattatattatactcaaaccttttaattatcataacataatacatgtatgtttacgaactttggtaggcttgcggagcaagcacctaaggttcgccgtcatttgaccgcaataagcggtcaaggtaaaataagctgtttatattattctagatatgtaattgttaaataatcattatatactcaaaccttttaattatggtaatataatgcaagtatgtttgcgaacttcggcaggcttgcggagcaagcacgtaaggttcgccgtcatctgaccgcaataagcggtcaagataaaataagctgtttataatattctaagttatataattgttatattttacttcaaaaataaattagtaaataaagtttgcaaatattataagtaaactagtatataacatatcaatttattaaaatattctttataaaaacaataattaattttgttaatataatcttgaccgctataagcggtcagatgacggcgaaccttacgtgcttgctctgcaagcctgccgaagttcgcaaatacatttgcattatactatgataattaaaaggtttgagtataaaatgattatttaacaattatatatttagaataaaataaacagctaattttattttgaccgcttattgcggtcagatgacggcgaaccttacgtgcttgctccgcaagcctgccgaagttcgcaaatacacttgcattatattatgataataaaaaggttagtaagtaatataattatttaacaaattgaattgcagttaacaatttacattaatgaactatgggttaaaaggtacaaaaacaaaagtatgtatacaacaaattgagatgttgtaaataatttatattgattaattatagattcagagacatgaaatctaaggtaagaaaacaataattttataataattttcaatcttgtttgatttatgatactttaataatttacataaatagttagtaaaaatatgtaaaaataaaagaatgcctttattggcattcttttaatataaacttttacgctggatgagtcatatcatcataattgactaagtctttgtcaattttatatttttcagcttttctctgttcaaagaatttgactgcaacttggtcaaacagcgcatatgaaagtacatcttccggctgttctgtccattctgcacattcttttttgagtttctcaagctcaggctttattaggtcagcaggacggcaggtaattgccttttcatttcctattatcttctttctgaattcatcatcaatcggaacaggagttctgccgtattcacctttacaaattccctttgtctctttggttaccatcttatagcgttctcccatgagtacgtttaataccgcctgggtgcctactatttggcttgtgggggtaacaagaggaggatagcctaaatctttacgtacttcaggaacctcttttaatacctcgtcaagtttgtcttctttaccttgctgcttcagctgagaaactagatttgacaacattccgcccggaacctggtattttaatgtgttaatatcaacgcctaaaacctttgtgctcataagaccggaagccaaatacttttctcttaaaggtttaaagtattcagcaatttcagtgagcaggttaaggtcgattcctgtatcgtactctgttccttgaagtgttgcaaccaatggttctgtaggcggctgagatgttcccagagccataggcgacaatgccgtgtctacaatatcaacaccggcttcgatagccttaagatatgtcattgaagcaacaccgctggtatagtgtgtatgaagctgtatcggaattttgacagcttttttcagtttctttacaagttcaaaagcattgtatggagtcaaaagaccggccatatcttttatgcagatagaatcggcgccgcagctctcatattcttttgccaactttacaaagaaatcattattgtgtactgggcttatagtatatgatatagccgcctgaacgtgacctttttcttttttagtagcattaatagctgtttgaagatttctaacatcgtttaaggcgtcaaaaattctgattatatcaattccgttagctatagatttctgtacaaaatattcaactacgtcgtcggcataatgtctgtaaccaagaacgttttgacctctgaacaacatttgaagttttgtctttggagcggcttttctgatttttctgagcctctcccaggggtcttcattaaggaaacggagacaagcgtcaaatgtggcgcctccccagacttccagagaatgataaccgactttatccattagaggcaatgctggcagcatctcttcagttgtcatacgagttgctatgagagattgatgcgcatcacgacatatggtttctgtaattcctactttagccataatattttcctcctataattattttaagattaatgagcgaacatagcgaggaatacgcctgccgcaacggcagaaccgataactccggcaacattcggacccatagcgtgcatgagcaggaagtttgaggggttttcctcctgtccgactacctgtgatacacgggctgccatcggaactgctgatactccggctgaaccgataagcggatttacttttccgtgggtcagtttgcacataagtttgcctagcagcaaaccgccggcagtactgaaacagaatgcaataagaccaagcgcaactatacctagtgtagcaggtgtaaggaatgtttctgcctttgcggttgcgcctactgtgagacccaggaatattgttataacattcattaaaccattttgagcggtctttgctaatctatcagcaactccgctttcttttatcaaattgccaagcattagcatacctacaagcgcaacagcgtcaggcacgattaaggccacgactattgtaacaatgatagggaacaagattctttctctcttgctgaccggacgaagctgttccataacgatagaacgctcttttttagtagtaagtcccttcattataggcggctgaataaccgggataagagccatataagaataagcggctatggctattgccggcagcaattcaggcgccagtgttttagtaacgtatatagcggttggaccatcggctccgccgataattccaattgaagctgcttgttcaactccgaatccgattgccggaatagctgcgcccaatgcgagagcaccaagaaaagttataaatacgccgaactgtgctgccgcacccaaaagaatgctcttagggttagcaataagcggtccgaagtcagtcattatacctattccaaggaagataagaggaggatagattcccaatttaactcccaaatagagcaagtccaatagaccgccttcagcaaaaatcctttgtatatccaaatgaccgtctatcaaatacgccgggtctgtaaaaaattcattgtgcattaatatagcgcctgaattttggaacataggcatatttgttagcagaacaccaaatgctataggcaatagcagcagaggctcaaattttttcactatagccagatacagcagaacgcatgcgataactatcataagcggagttcctataacttcaagaatatttccgcctgatgagatagtctcagatattgagtttatcagcgctgctataccggtgcttcctaaaaagcttgaaaaagcctgtaacaaaaaatcaccctttcatcaatatattttggttatgtttcggttggataataaattaaccaatagaaacaagggcatctcctgtattaacggaagcgccttggctggtgcagacagcaactattttaccagattttggcgccataatttcattttccattttcatagcctcgagtacgcaaagcacatcgccctcatttactgtgtcaccgtttttaacttttacagatacaatgcttcccggcatcggtgcttcaacagttgttgcgcccgaaacaggggctgaggctgctgaagcctgcggagctgcttttggagctgctgccggctttggagcaggagcggcagacttttgaaccggagcaggagcgccgccgatttcttcaacctctacctcatatgaattcccattaacacttatattaaactttctcattatactttacctcctggtattgagtttaaaatcttgaattgattacgtcggtcaggccggccttgctccagcttggcagagcgttgccaactcttctgtatgattttatatttagattataacttgatgtgttaagacttgcagctatagcggcagtcaaaacagctatcaattcgccctcgtccatctcaggggctgattttgcagtcgcgttggcagcctgaggcagtgtcttgttactgtttgagggtgtattttgttctttttttgaattatcattgtaaaatagtgttttcatacccattaaaacaaacataagaatgactagaactgcaaacacgatagcaagtccaacaattgtgacctgcagaccttcagatagtgctgcgcctattgtcatagctttattctcctttcatatttatgtttaacatctattacagaggaatattaccatgctttttggcaggtcttgtatctctcttgcttgcgagcatttcaagagcgcttataattctcggacgggttgagtccggctctataacatcgtccacataaccgcggcttgcagctacataagggttagcaaatttttcggtatactcttgaattttttcctgtcttgcgagaacagggtcttctgcatttttaatatctcttttaaatataatattagctgcgcctgacggacccattacagcaatttcagctgttggccatgcaaataccatgtcagcgcccaaatgcttgctgttcatagcaatatatgctccgccataagcttttctgactattacattaatttttggaacggtagcttcagagaaggcaaataatagttttgcaccatgtcttataacaccgttgtgttcctgattaactcccggtaaatatcccggtacatctgtgaaagtaacaagaggaatgttaaaacagtcacagaaacggacaaatcttgcacccttatcagatgaatcacagtctagcgaaccggccataaatttaggctgatttgctataataccaatggtagaaccattcattctagcaaatcctgtaactatgtttttggcaaacttatcaaacatttcaaagaattcgccgtcatctacgatttcttttattacatctctcatatcataacccttgttgacgtcaaccggaacgatttctgaaagtttgtcagaaagtctgtttaaatcgtcttcacagtcataaatcggagctgtttcaagattgtttgaaggaagaaatgaaagaagaagtttaacctgttcgaaacagtcttcctcagttgcgaatgccttgctggcaacaccgctttttacggcgtgcgtttgagctccgcctaattcttcaaacgaaacgtcttcgcctgtaaccgatttaacaactgaaggtccggttataaacatctgtgaagtcttatcaaccataaaaataaaatcacagatagccggcgaataaacagcgcctccggcgcatggacccaaaactattgaaatctgaggaactacgcctgacgcctgtgtgtttctgaagaagatatctccaaaaccttttaaagcgtcaataccttcctgaattcttgcgccgccggaatcgttaattccgatgataggagcacccatttttgttgccatgtccataactttgcaaatttttgctgcctgcatttcacccagagaaccaccgataaccgtaaagtcctgagcgtatgcgtagaccaatctgccgtccacggttccgtatccggtaacaacgccttcaccgggggcttctgtctttggcatattgaattcgttgcatctgtgtttaacaaaagcgtcaatttcaacaaagcttccttcatcaaaaagcattgcaagtctttcgcgggcagtttttttgccgctttcatgctgctttttaattttgtcagcgcctccgccttgctcgattgtacggcgaatctgctgcagctcttctattttttccaattgtattacctccttgtgtttaaattgtttagtgatttaaatcacatatgttaaaattaattatttttctgttataaaaactttaatgatgtctgtttccagactttttagtgctgttatttttgcttctttggataccatttccgctatagtgaggtttctttttggcaccggttctgctttttggttttgagtttcttttgtgtttttcagcagcgtctttaccgtagatactctcactgttttctttggatgattttttccctgttccgatttttttcagcatatttacttcagattcggaaagctttctccatcttcccaaaggtaaatgacccaaattaaggcctgcctctttggtgcgtttcagacgttttactatacagccaaccgattcgaacatctttctcacctggcggtttcttccttcatgtatagttatttcaagtttagttccgagctgggtggctcctataacttcaacttttgcagggcttgttcgtatcccgtcaatcactactccgtttctcagtcttgttaaggtttccatattaatattaccggtgacttcggcaacataagtttttggaatattgtttttaggatgagttatattgtaagtaagctcaccgtcgtttgtcagtagaagaagaccttctgtatcatagtccagtctgccgacaggataaagcctgattggtatatcagtgaccaaatccataactgtgtccctgcctttgtcatcacttacggtagtgacaaatccggccggtttattaagcataatataaaccagctttttttcaattctaacaggtatatcgtcaaccattaccaaatcgttgtcttcatcaatcttaacgcccatttcggtaacagtttctccattcacacggactcttccggaacgaatgatttcttcactgcctctgcgggatgcaacgccgcagtcagcgagatatttttgaagtctgaccactgaatcaaaccctttcttttgtttttaaccgcggctagattattagactaaaataaccgcatgttatcataaacgctttgcttactattatagcctatttaaaaattaaattcaataaaaaccgtaatataaatttgactgatattactgttttaaactaggtatatattagtatttttgtataatttttaacaatcgtatatggcaagcttgtatgctggctttaaaaaaacgcatagtataaaaattataattgatttccatgcagaaatagtcttgatttttatttacagctataaatagaattcagacaataatagttacaaaatgttgtctgtttcaatatcttaaactttttatataactaacttatttttatttatttcgttaacagattttattattttgataaacaatcagtgatttataaagagtgtctgctttggaaaaaatattttttatatagtgatattttatataactaaatttatacaaaaaaggaggcagacaattattgtctgccataaaaatatattttatttttctgataaaggaatattaagctttgaaaaggtacgcttaacaaagattatacatagaataacagaagctatttcggctataggtattgaccaccaaacaaggtccagattgccaaactttgatagtataaacgcgaccggcagaagaataatcatctgtcgtgaaatagatgttacgagcgaatatattccctgcccgagagcctgaagtatagataaagttactatacaaaatccagctgctataaaactgatacttattattctgagagccggaacacctattgcaatcatatctgacgaggcgttgaacattccaagcagctgtgttgggaagaactgaaaaatcagcaaaccaaaaatcatgattgatacagcgtatgttatgctgagtttcatcgtctttataattcttgaatgtttttgagctccataattatatgcgattattggaaccattccattgttaagaccaaatatcggcatgaaaatgaaactgttgagtttaaaatatacgccgaaaactgctgttgctgttgcggtaaatccaataagtattttattcataccaaaggtcattattgatgatatggctatcataagtatggatggcagaccgactttataaatgtttgccacaatgttcttttgaggaagtatttttttcaggtcaaactttaattctttgtttacttttgcattacaaatcactgccagcagcatagctacgatttgaccaagcaccgttgcaagagccgcgccgcttacacccattttcgggaatcctaaaagaccaaagatgaatatagggtcaaatattatgttaattattgcgccaataccttgagtaaacatagtataaattgttttacctgtggactgcagcagtctttcacccattatctgcccgaatataccaaatgagaaaatacagacaattgagagatattcatatccgtattgtataatttgggcattgtctgtctggattctgaaaaaccaatgtgatagcgttgaaccaaatagtagcagtaccagccagttcatgattgcaagaaagatacttatgttagcagctttattcgcgaatttgtaatctttagcgcccagacattttgaaacgaaagagtttaccccgactccggtaccgctggctattgctatcataaggttctggacagggtatgcaagggatactgctgtgagggcattctcgttgatttgggcaacaaagatgctgtcaacaatattgtaaagagcctgaaccaacatggaaataattatgggaagcgacatacttataagcaatttgttaacgggcattgtacccattttattctcctttacggagtcaagtgtgtcaacttcagtgttgataatttttgttttgttttttgacattactttacctctattcttaaagtgtaagaactattctaacatattatagaagaaaatgtcaaataatttatgttgaataaattttatctcttgttgtttgctattatatgatgaattgaaagaaatgctgaaaaataaagatgtgtttttggcggtataattattttattgtaaacaacagtacctatagttcttcaagtccggttattttcatttttccgccgctgaaacttactgtatatttgtacttttcacttatatctttgactgagccgtctttatatactactctgatagttgaacttcgtataacggttgccgcagtgtcggatattttttctccgccatagcaattcaatgaaagtatttcttcgctttctacggattgacggatttgtttatggcttttgagttcctggtcagcagcagaacttgagaaatatacatcaatatatgaagtatcccctgtattgatgccgttaacaaatgaaacaagagcgccttcaataaaatcttcagcagcattggtatcaacggaagcggccggttcctgattgtatgagtaggtattataataattgtttacaggcggcgcttccggctgctgaacaactattacctgaggcggagctgtcggcggtgcgggcggagcaggcgtagccgtagccgctgctgtttcagttggtttagcgttaaaagaattaaatgatattatcccggttgaaaataaaaggataaaaataagggcaaaaactaaaataactgataataacgaaactgttacgattaaaccagtgtttgacttgccatgtcccggaccctgttcattataatttggattatacaagcaaaacccctcccaaagtacgtacttatatattcacattatataccaattgtagaattttgtaaatatttattatcattaaaaacaaattaatactataattaaaatatatgaaataaaaaatattacttattttataatagaaaaattgtgtctcacactgaaaaaagtctttttatatagttagtttagggctgttcagttatatgtgcatatagtatttaaattgtctttggcaacaagttatagagtttatttattttagaaatattaaaacaatttttacttcagttattttgataacaaaaacgccctaaaataatatagggcgtaattaaagctttattatattttttcaacttcttctttaataaacataatacaaaagctgataatcagaagcaggcatgaaaaccagattgcatgaattccatatattttagtaagcataccgccaagaccggcgcctgcggcaaaagtcagtaacacgcaaaaatagtagagcgattttctaagaacacttttttcttttgtataaaaaaaggtgtaaagtgattccatagcacttcttatgtttccgatacacattgtgcttgcataagggtgaccttcaatttttcggaacgtataaacctgcatagcacagacgaatgatactaatgaatttgccaaaatatcaagtgagttcggaataaatcctacggttaaaagtaagcttatttccgcagctataattaactgtctccaatgaattcttttcatatatttaaaatggcggtgtattacttgtgctagatatattccggtaataaacgccaatatcggaattaagtagcgcactgcattatataattttccctgaaatatgtatgaactcatcagcacaatatttccggtttgtgcattggcaaatacttcttcacggcaacagtaagtatatgcgtcctgaaaacctcctgagagtgttagaaagacagcgtttataatggcttcagacatttgcctggattttaatgacgaaattattgtgttaagctgcttcatttaataacttttcaagtgtaactatttttactgacagggcaaatatttttgttgccagttttatatctttcatgtttgcaaatgtaggagctatacggatattttggtcttcagggtcgtttccgtaaggatatgtagctcctgccggagtaaatgccacgcccattttactgcaaagtgtaactgtgtcggatgcgcatccctttaaggtgttgaacgagatgaaatatccgccgtttggttttgtccattcagctataccgagcccgttaagttcatcgtttaaaattttgtctactgcttcaaatttggggcgcagtatatcagcgtgttttgccatatgagcttttattccggttatatttttgaagtagcggacatgtcttaactggtttatcttatcaggaccgatggttgcatactttaaaaatccttttatatcaatgaggttggcaggactggatgcaacagctgatattcctgaacccggaaatgttattttgcttgtggagcagaattcgtaaaccatatcaggatttccggctttttcgcattcactgataatgtcaggaatatcggttttttcattttgatatattgagtgcacgcagtaagcgttatcccaaaagattctaaagtcctttgctagaggttttaggttcgcaaacctttgtatggtttcgtcactaaaaactatgcccatagggttttcgtattttggcacgcaccatattccttttattgtgtcgtcagatgacacaagttcttcgacaacatccatatcaggaccgttttcattcataggaacagggataagtttcattccaaaatgctctgtaatagcaaaatgacggtcatatccgggagcggggcacaaaaatttcctgtcctcaacctgacaccaaggtttctctccaagaagcccatctgtcatggcgtggcttataatatcatacataagtgtaagactgctgtttccgcctactataacgttttcagggcgtgttcccatcatatcagccataagctgtttcgcttccgggattccgtccagtcccccgtaattacggcagtccataccgctttcagcgtctagaatacttttagagtttaccgtgttcagcatttccattgataaatttagctgttccttatccggctttcctctggataaatctaaattcagttctaatgctttgatttcttccatttctgatttcagttttgataactctttttttaagtcttcagtgcttaaatctaaatatgacacttgaaattccaccttttttatattttattgtattattttcttgacttatgacatttaataaatataatataaaagtataaatatgtaaaatgtattattgatattattattatatcaattttgtataattgggtgcatatatggaggaaataaaatgaatattaactatgattattaccgtatattctattatgtggcgaaatatggaaactttactcaggcggcaaatatacttttgaataaccagcctaatataacccgctctataaaaaagcttgagaacgaattgggctgcactttatttgtcaggtctaatcgtggagccacgcttacgcctgagggagagaaattatttgctcatgtatctgtggcggttgaacaattgcgtgcaggagaggaggagttgtcgcgcgataagagccttcagagcggtactgttactgtaggggttagtgaaacggcgcttcatggcttgctgctttctgtgctgaataagttccgctcaaagtatccgggaatcaggatacgtttgtcaaaccattcaactcctcaggctatgtcagctctgcgaaacggaagagtggacttggcggttgtaacaactccaacggatgtttcaaaccctcttcatgagtataggcttacaacgttcagagaaatattagtgtgcggaaaggatttttcccatttgcagaacaaagttcttcaattaaaagacttaacaaaatttcctttaatttgtctcggtaaggaaacaaaaacaaatgaatttttcagcagattttttatgagccacggtttagtctttctgccggatatggaagcggcgacaacggaccagattctgcctatggtgaggaataatttagggcttggttttttgccggatatttttgcggaacctgctattgaaatgggagcaatatatgggcttaaacttcaggaaaagataccaaggagagatatatgtttgcttaaaaacacagaacgtccgttaagcattgcggcaaaagagcttgaaaagatgctgctgcaggaaaagacattattggaatagtcatataggttataaaataagcaacggtaaaaataagattataaatatacaaagtttttccatataaatatcttgcttttaatataatatcaacgtctaaaatatttatgtcttgataattgcaactattggtaaaataaaattaattgtatgatttgatatagcagtataaaaagtgtttatataagtatattaattgacgtttttatttgaaaataactatcaaattaatttggtataaatatttgctaaagatttgtttaatgcaagcagcagagaatgttaaaaagattacgtgaataaaaacagtattaataagagctgtaaacactaaatttatttgcggtgtgtttaattcaatattggtttggccctaatgatatttattgagattttatatttttattattagaattatttagattatgagtttatgaaagtctaagattgtattcaaatttattttacttacgctaagaatttataagatataagttgtatataaaaatttttattaaatcaaaataacgccgcggtagttcaaattaccgcggcgttattttataattatattatgcttttccgtttgaaccaaacagacgtattttttcaattactttagcttttacattttctctggcaggtccaatatattttctcaaatcaaacaaatccggtttttctgcaaatatctctctgattttatcagtgtatgcacatcttaactctgtgtcaatattaattttattaacgccaagtgatatagctttctttatactgtcgttatctactcctgacgctccgtgaagtacgataggcatatttaggtctttttttattgtgtcaagcctgtcgaaatcaagttttggtatacccttatattttccgtgagctgttccgatagcaatggccaaatagtcaacgtttgtctcgtcaacaaactttcttgcttctgccgggtcggtgtacatagcatccttctcatcaacagagatattatcttctataccgccgagacgtccaagctcagcttcaacagaaacgtcaacatcatgtgcggcttcaacaactttttgagtgagagcaatattttcatcaagtgaaagatgagaaccgtctatcataaccgatgaccagccattttttaaacagttcataacagttttaaagctgtcgccgtggtcaagatgaaatgctacaggaacactggctttgtttgctgctgttgttattaccgctgaaagatactcatatccggcatatgaaatagcgccgcatgttgtttggataaataccggggatttctcttcttcagcggcttctataatagcctgggcaacttccatattaacagtgttaaaggcaccgactgcgtaaccgttcttgtgggcgtcatccaaaatttgcttacctgtaactaacataaaatttcctccaaatataataaattttttatttttctatatcattttcacgataataataatacatatattgttgggcaaaaccggcgtaattgccgtatttttctgttacaaagctgtcagtttccttttcctcaactccatatacctgatttagaatacgttttatccagacgtctttgggaaacagttcatatcttcccattgaaaacaaaagtatacagtcggcaacctttccgccgacaccctttattttcagcagttctttttttgcaagttcagtcggcatttcgggaatatcttttaagttaacttcgcctgacgagactttttctgcggcgtccatgatatatttatcacggtaaccggctctgagacaagctaaatcttctatgctcagactgtttaaacgttcaggttcagggaaagaataatactctccctcaggaataccaagtttactgttgtatttaaaatcaatcttgtctccgaattcacggcacatagtctcaagtattttttttatcctggggatattattatttgccgaaattataaatgatattatagtttcccaaatatcttgatgaagaattctgattccgccgccgaaatcaatacatttttttagagtttcatcgtggctttcaagatatttttttatttcagaataatctgtatcagcggaaaaataatttgtccaatattcattatcagaatcagggcagtatattgtgtcgtttgacactctgcaaacttttccgccgcaaatgccgatatagccgctgtctgactggttccagcggaagcattgtccgcattcaaacgtatgtataggatcaaagtcctgttttaagtaaatcatttcttaatctctctatctgtttaatatatattcttgatacatggagggttttaacatatatgttcacatattttactgttatagaagtgtgatattcaatagattctttaacggtgtctgcaatttttctcgcttcttcaacaacattgcatggatatcttaaagacagctcaatgtcgagtatgagacggtttcctttagtagtgctgctttttaatttaagcaatttatacatgctgggaaaccgggaagtttcatatgaacaaatatcaaaaatcgctttatgagaaattttgtaatctcccaaatagctgtaagtggggcgcataacggttttttcttcaactatagtatggtttttgcgattaaaaaattgaaccatagggtctataaaatatccggaaaactgtttttttacttcaaatgtaggaacaggaatcacatgctttccgtgtttagttctcatttcgttagcaattttcatctcttcaggagttgatacatcttcaatataaataaacttttctattggagaaactccgatagcgtcagctattttattcgccattctctcacttgtaccaataattaaaagcgattgtatattatagtccgtgatggcttttttcacttcatcctggtgaatcttatcactaaaaattgctcttcgcacagacgcaactttagttggttcgcgttttgcactttttccggctataatttgattatccgagaccagcaagccgtcgtctatgatataatcaatattattttcccgggcgacccacatactgtgatgtgattttccggttccggattttcccacaagtgcatagaccttcatagtattactccttgtcaagtttctctttattttcacattctgaaatcttatatgaaagcctcataagactgtcgcttaaatgaacgttttcaactattattccttctgtttcagcaagttcggtatatgaaaaattcataaatgcctttattcccatgcttattaagtcctcagcaacagctttcatagcttcctttggaactgtcagtatagccattttgggatgattttcgtctataaattttttaatgtccgcataatccataaccgtaaaatcactgacttcagtgcctataacttcaggacttgaatcaaatattcctataagtttaaagccgcggctttcaaatttagtgtttgtggcaaaagttcttcccatatgcccggctccgaccaaaacagcggtataaccacgattgagaccaagtatatttgcaatctcagtcctgagcatctcaacattatagccgtagccctgctgaccaaacccaccgaaacagttgagatcctgcctgatttgagaggctgtaactcccattctctcgctaagttctttagaagatattctttcggttccgctgctgcaaaggtctgttaaatgtctgtaatatctaggaagtctgttgatgacagaacccgatacttttttatccattgtttattctccttaactgcactgccgcaattgcggcagtacaaaagtagttcggtttgtgaagctggtcagaaaagccgtagtattatgataattttgacattacataatctgcaaactctgcagaagttgctccggtgtctcttccggttatctgaagcttcttttcagtgtacatacactcatcaagagcgttttcaagcgccttagctttatcggcataaccaatatgctcaagcagcataacagcagctcttatgatactgcatgggtctgcatatatgtctcttccttcctgaaccattcttggagcgctgccgtgaattgcttcaaacatagcatagcgttttccaatattagcacttccggcagttccaactccgccctggaactctgcggcttcatcagtaagaatatcgccgtaaaggtttggcagaaccaaaacctggaactgggttcttctcttagggtcaacaagttttgctgtcatgatatcaatataccagtcgtccagttcgattccgggataatccttagccacttctttgcatacgctgaggaagtttccgtctgtagtctttattacgtttgctttggtaacacaagtaacgcgtgttttgccagcttttttagcatattcaaaagcggcgcgtgctattctttctgttccttcatgagtttgaacaacaaaatctatagctaaatcgtctgtaacgtttactcccttagaaccaacagcatagccgccttcagtattttctctgtagaacgtccagtctattccctcttcgggaactttcacgggtctcacatttgcgaataagtcaagagccttgcgcattgcaacgtttgcactttcgatattcggccatgggtcaccctgtcttggtgttgttgtggggccctttaaaataacatggcactgctttaattcctccaaaacatcatccggaagcgcttggttaacttcggcacggtgttctatagtacagccggtaatttctttaaactctacttttccggattctgtttcgtcttttagcaagaactttaatattctttcagcctgctctgtaatagccggcccgataccgtcgcctccgacaacaccgattactattttatcaagtgtgctgaaatcaagaaaatctttttcagctttcatcttttcaacacggttcagctgctcgctgagcacctgaccgaatttttcttttgcttctgtgatttgtgctgtgtagtccatttatatctcctcctgtatattgtctgtcttgcctgctttataagttttggttaagcattctctttggtgtaatttaaaagtccgccggcgagaagcatagctctctgacgctctgaaaggtcaagtttcgcctcaaactcaaagcctttagttttgtctgtaatttttattatatcactgtttttaacttgttctcttacgtttgcgatatacaagtcgtccatttggtcaactttgtcatagtcagcttcgtttgcgaaagtcattggcaggattcccgcattgattaggtttgccatatgaattctagcaaaggattttgtcaatacggctttaacgccaaggtaaagcggagcaagagcagcgtgctctcttgaagagccctgtccatagttgcttccgccgattattatgctgcgtttgagatccaaagcgcgttttggaaattcctcatcgcacactgcaaaacaatattcggaaatttttggaatattagaacgcagaggaagaatctttgctccggcaggcataatatggtctgttgtgatattatcgccaacttttaaactgcattttgcgtctatttcgtcgagaagcggttctgataccgggaacggtttgatgttaggtccgcgaagaacttcaactgtgtccattttttcttcctcaatcggaggaactaccatattgtcatttatagtaaacacttcaggcagtttgaactcaggcatatcgcccaaacttctggggtccgtcataacgccggcaattgctgaaactgcggcaacctcaggagataccaagtaaacctgaccgtcctttgttccgcttcttccctcaaagtttctgttaaatgttctgagcgaaataccgcctgaattaggtgactgtcccataccgatacaaggtccgcaggcgctttccagtattctagctccggcgtcaatcatctttgaaagagctccgttttctgctatcatattaagaacttgttttgaacctggtgcgatggagagagaaactcccgggtcaacagtttttccatctaaaatatatgcaactttgagcatatcaagaagtgatgaatttgtacatgaaccaatacatacctggtcaattttcattccggcaagctcggaaatctttttaacattgtcaggtgagtgcggacaggcagccataggctcaagttcgctcaaattgatctctataatttcatcatattcagcgtcagcgtcagcgctgagaggtttataatcggcttccctgtcctgagcttttaaaaattcacgtgtaatttcgtcagacgggaatatagaggtagtagctccgagttcagctcccatattagtaatagtagctctttccggaactgaaagcgatttaacgccttcaccgcagtattcaataaccttgccgacgccgccctttacagacaaaattctaagaacttcaagtataacgtcttttgcggcaacccatgggttaagctttcctgtaagctcaactttaactattttagggtatgtaatataatatgtgcctccgcccatggcaacggcaacatccataccgccggcacccatagctatcataccgagacctccgccggtaggcgtatggctgtcagaaccaattaaagtttttccggggattccgaaacgttcaagatgtacctggtgacagataccgtttccgggacgagaaaaataaataccgtgctttttacaaacactgccgataaaacggtggtcgtcggcattttcaaaaccgctttgcagcgtgttgtggtcaatatatgcaactgatttttcagtcttaactctgggaactcccatagcttcaaattcaagatacgccatagttccggtagcgtcctgggtcaaagtctggtcgatacgaatacctatttcctgccctttgacaggttcgccctcaaccatgtggtctctcaatattttttctgtaagtgtcaaacccactaaaaatcaactccttttcaatatacaaatactttttaattgttatatattcattttatattaacatgcccgaaatgtcaagcgttatgttaagtttttcacaataattacagtgtttccaaacagtgggattattgtgaaattgaactgtataaatgagaatatattgaaatgaaaatcatataatctccatttgtttttaattacaaacgttagtttgatgtgactagcccggttgcgcccgccggacccgggcgctgacacatatttttttattttattatatattaaatatggagtaactttgttaataatctattaaatataaaaatatataaaaaataaataaggataataacaatagaatttctatatggtttgaaaagttaagaataaaagcaaaaataaaattataagaatagttacaaaatttatttagttaaaaaggtagtttagcaagaaatattagcaacaaaaattatttagcaaaaaaatttatttagcaagaaatattagcaacaaataatggtttggaaaaagaattagactgtaggtaaagtatgaagtgtttggcaagatgcacaagacaatgttttagaaccgcttgcacaaggagttatgaggcagctttatggtctcaaggagaataaatagcgtttccgagcgttgcccatttctcagttcagctttagcaatcgttctttcgttggagaaatcttactttcttgtataacgtttcccgtaaaatcacttttttatatgttaaaataaattaaaaatttatgtttattttatattataaattactataatctatgtttataaaagtaaaatgaaaactataagtatataaaataattttatcaataaaatatctcaaaatccgatttaaaatcacattcatatttaatattcttgaaaagaagaaagtgtgtcagcgcccgggtccggcgggcgcaactgggctaggcacaccaaactaacgtttgtaaataaaagtaaataaaatctatttattaatttcagatttattagtccgccctacgagataatcaatagaaacatcaaaataatcagcaatagctgttatagtttttagactgggttgtgcagttccgtattttaaccgttgtacagaattaggctgaatatttatttgttcggcaagctgcttttgagtaataccatttgaaactcgcaaatttcttaatttattattaaaattattcattaaaatatcaccatttttaatatgaattatataaatgtgtcagcacccgggtccggcgggcgcaactgggctaggcatatcaaactaacgtttttaaataaaagtaaataaaatctatttattaattttaggattgtcagtccgccccacgagataatcaatagaaacatcaaaataatcagcaattgctattaacatatcatacgccggtttacgggatccttgttcataattttgaacgcctcgttcactggctcctataaattcagcaagttgtttttgtgtgacattatttaatttacgtaactcttttaatcttgtacttaagttaattcattaaaatatcaccattcttaatatgtattaaataaatgtgtccgcgcccgggtctggcgggcgcaaccgggctaggcacatctaactaacgtttgtaaataaattatagtttatttattaatttctggattcttagtccgtcccacgagataatcaagagatacattataaaaatcagctagggaaatgagtatatcaaaagacggacgttgatcatttgcttcataacgttgataattccgttctgtaataccaatattagaagctacttgtttttgagtataattaaaagatattcgcatttcttttaaatgttctccaaaattaaacataaaaaataacctttcaataaattaatatatagaagtgcccatgcacaaatttgtctgctcaaaagattgggcatatcaaactagtattccgtaaataaaagtaaataaaatataatctatttatataatttgggattgtcagtacgtccaaccaagtagtcaatggatacgtcaaaataatcagctaaagcaatcagcacacttgccgtaggttcacgttgaccacgttcatagtattgatatgctcttaatgacaaatttacatcttttgcaatatctttttgcaaaaggtttttatctttttttaatttaataagtctgttagaaagtttattcataaaataacctcacaaattttgtaaaaaagtattgacaagcataaatgtgcatgatataataagttcgaaaagagcacgtgtgtgcattcgttgctttggaaagagatgatgcaatattatacatatataaaaatatctaaaaactatataatataagattatttggtgtattgtgtacatagtaaaacgtagttgataataatcttttgtattattatagtttaacatggtttgacaaaataaacaagccttttattgggcttgtattaaaaaattaaaagaggagggagttataatgagttactttttagaccctttcagcaaagtaaatattcagcagattgcttcatttatcatgtatggggatgaatttacaatacctacaaaaggctcttatgaacagagaatagaagaagcctggaattcttttgttaaagaggcaaaaaaattatatccggatttaaaagaaacagacaggatttttgactttattattttttatgcttcggtagtcgaggaaatatatatggaagtcggtatgaggtgcggagcagagctggctgtaaaactttttgaaaaagatatttaatataattattataaagattcacatcataattattacacagcatgtaaataaattcttacatgctgtgctaattattgtatctcgtaatcaattgacggttaaattgatatagaaattaaagataaaatagtggtattacttagtatgataaactttgaggttaaaatagcattaaacagtttcatgatttgttataatgttataaattatatatttgattataaaaatataattattatacaaaaacaattttaaaagttttgtgattagaaaatagatgtttatttataaattaaaacatttttctcgtattttggtttaaactttatatttttaaatcttttttacgggtatgcacaaattcgaaatcagaccgtctttgtcatttatctcagaaggagacgtgatatattcaagaaacaggtgtccgttaaaatcgtagccgtttatctccatccattcagctattgatttataaatatcgcatatctgatcataccagcctgtaaatgtaacgcaggctgtgagtgtttcggggacttctttaaatttaaggatctcagtgtcatcaaacttaccgttgacaccaatctgtacctcaatatccgggctttcatctttatggtcattatccatatagacagcgacaggagggcagtcatttgataaacaaatgtcatttttagcggcaagtgagtagattttcttccacagttctccttcgtctttatattccggtatcgtttctcttaatgctgccactgagcgttttggtactgtctttaattcaacattatattttggcatagtctcattcctttcaagttttttaatagtcttatcaagcgttaaaagccgtttttcaacatctgaatattcagcctgcatttttattcggcattcttttataacagtcagcatagcttcaggagaatagttcagatgtttaagaattttaatttcggatatacttatacccatatccctaagaagttttacattagatatttcggaaagctgtttggtttcataataacggtatccggtaaatttatctatataagccggggatagtatcccatgctcatcatagtaacgcagcatacgtatgcttaccattgacagccttgagaaatcacctatttttaacattatatttccttctttcgtacatgtacttttgagctcgtattaagtataatacctaacactgtgtcagagtcaacagtattttttgttttttatgaaaataaaaatttttttgaaaaattttcaaaaaaagtcttgacaaaaataaaattaggtattataatgcaagagttgactttggttcccctcgtgtcaacaattttgcgagcatgctggaatcggcagacaggcacgtttgaggggcgtgtgcttatggcgtgtgggttcaagtcccactgctcgcaccattatattgcctgattgtgtaagggtagcacaaatgactctgactcattttgtccgggttcgaatcctggtcaggcagccacaaaattaacttaatatagttaattttaaaaaggcttggtttcaagcctttttttattatataaaaacaaagttaaatttggttatagaatagtgtttttgaaatagttagtcatgatataattatttcagatgaatctttgaagtgtataaaatatatttctatcagaaactggttagtgtattattttaattgaatattttattcaggtagagatattaattgaaatatgttaattaagtttagagttaacatgaggtaacaaagacttttatagaaaattaaatggttattataagattgtaggtatagcgggataatgttctaataagtttcgttttatttgaaagaatatttgaatttatatataatttaattgtaactttactattgaaaataaaagtgtcaaaattaaatctcctgtaacaatataagttacaggagatttttatttatatatgaatataaaaatattttaaatggttatgattataagatgtgaactcaattgttattcgcctaaaccaagttgaccaaaagcattggtgccaaataaccacatgttaccatttttatctattgctaatgtaaagtcttttcctcctgttgccattgcaatattacttaaactccctacttttgtaggtattcttttggttaaataaaaaccgtttcctaactgcccatcacgttcttctccccaggtatatagggttccgtccgatagaatagcgatgctgtgattatatcctgtccttattgaatttacgtttccatttatactgcttaccagtgttggagttgtgcggtcaattttgtcatttaaaccgagctgacctacagaattttgtccccatgcatacaacttaccgcctgagattgccagcacatgctctctgtccgctgaaatgtcagaataactactgattactgcggcaggtgttatgcggtctgcttttgttccatcgcctaactgtccgcaagtatttgcaccccaggaatatatggtatcataatccattaaggctataataaaattttcgccgcaggctattttgctgatttcgcttaatccagtaacttgcccaggggtttttgttgaagtatcagttctgcctaattgacctctgtcattatttccccatgtccaaactgtaccatcatcttttattgctgcactaaatccagttcccgctgagatactgactgcgttgcttattcctgggattttcctgggagtgtatttgtttaatgtgtttccgtgtccaaagtcatcataagatccatcaccccacgtaagcacctcaccatcatttgttaaagctacagcgctgtagctttgggcgcttacattttttatattagtttgatctgtttttataggagtgttagttttatatgtatattatctatcaagttcataacatataattttttcgtcgtatattatatatatttttccgttgataatttgcatttgattattaaatgaaccttccggcaaacttggaccaacttcccatgagttgctggcgatatcatatatttgcaatggtgactctgagccggaagcaacataaatcttattattataaagttttgctgcacaagaattatatccattatatccataacctacactatttggaataggggcaccatcatatgtaaggtcatttaataagtccactattgttaagtctttgtcttcaaatgaatatataagattttcatcctgaacaactgcttcaggggcattaccaaaccaatcaacagatgttatctctataccattttttacatttgtaaagtttacaggacataaaacataataatttccattatatgctgctgttattatattttctccattttgcacacttcctacagtttcccatacatccttctgtatatcatatgcttgtatatcgtcaattatataagaagggtcgtcataaccaaattcaaagccaccggcggcgtaaatttttccgtcatgaactgttatactagatccaacttttgcattttgcatatttgacccttctgtccatgtgttcgatgctatatcatatatataaaatgtatatagcattggtgacggtggtcttgctccaatgacataaattttatcgttataaagagttgcagaaattgtagtcatttccatatagtatggaataggttctcctaaagaaattgtatttgttgtagtgtcaaaaattcctaaatcaccattacagcttataatataaattttattattataagctacagttcttgcatttaaattagagtttatagtatttcctacagtttcccaacttccgtttgttgctgccgcatttacgctaaatgaagtaaattgtgttatgataataaaactacataatattagtgtaataactaatattattgatataaatgatttaaataatacagatttattcataatattatttacctttcttgatattttttatattttaagtgttatattgaatgtgcattggaatcacctttgctttattaagtatttataagataattatatgttactattataaaaaattcaatggtatatttgcatgaaatagcgtgtaaatgtttgtaataattgcgagttgcagtataataatgtgtatgatataataattaattgtgaaataaattcactatttttatagttcatgttcctaagacgaaactttatcacaaaatttttgcagtggtttctagttgatataatttagatattatataataaaaatttaatgggataaaacaaatttataaattatactatattttaggatagtttaaatataaagttgcatttttaattatttttgttataatatataaaggtttttagatataaatatgtttttattgtattagtggttattatctaaaagattttgaaggattatagaaaaatctaaatatttattaatatattacaataaaatttctgattggcggcggttatattttgtttgataaattgaaacagaaaactatgtcagcaaacgagtatgtcaaaacttttgtaaagtggatgtttcttgctactataaccggaggttttggcggtatagtcggttccctctttaatatgtgcattgtatatgttactaaaatgagaaataaaaatagctggctgatttttttgcttcctcttggaggactgctgatagtgtttctttaccggatttgtaaaatggataaaaattcgggcactaataatgttatcaaatcagtgagaagcgaggaggatgttccgtttcttttggcgcctctgatttttataggtactactgtcactcatttatttggcggcagcgttggcagagaaggagctgctcttcagcttggcggcagtattggagaaatgacaggtaagctgattaagctgaatgagaatgatatgcacattataagaatgtgcggtatgagcagcgtgttttcagctcttttcggaacccctctgactgcaactttctttgctcttgaggtcataagcgttggtataatacactattcggcttttataccgtgtcttttgtcggctgtgctgtcgtataaagtttctttattgttcggaatcatacctgagacatacttgcttccatacataccattgttatctatggcgtctttctttaagaccattgctattggtatagtttgcgctgttgtaagcataattttctgcgttggaattttcggtacaaataagctttttaagaagtggcttaggaatccttatctgaggatttttgttggcggagttataatagttgctttaacattttttcttggaacaactgattataacggagccggaatgaatgtcatcgaccgggcagtattagaaggaaaggctttgccttatgcgtttctgttaaaaatgatttttacagctatcactattggatgcggtttcaaaggcggtgaaatagttccgacattatttattggagcgacgcttggctgcgttctgggaggattgctgcattttaatccggctttttctgctgcgctggggatggttggtatgttctgcggtgtggtaaactgtcctatagcctctgttttgctgagtgtggaattattcggttccggaggtattgtgttgtttgcgactgtggcggctgtaagttatatgatgtcaggttattatggattatacagcggtcagaaaatagtttactcaaaacttagaactgagtttataaatatatatacaaaaaaagaatattaattttgcggacattcagtccgctttttattttgtcccggcgtaatatgccgggattttttattttaaagaaatattttaaaagttaaaaatatgtataggtttttattgtcaatcgtattgtttgatgataatagattatcaggatttaattattcagtgattgataatgattttattggtgtaaggcaatatattttctactattgtaaaaggcgtttttgacaatagattttattagttttaattcgggtaaaattaatgtcgatatttttggataaaaaacttttgggaaataaaggcggaaataaagtctttgtctaactctatcaggtagccgtttattaaggattaaattataaatgtggacataaatgatatgagattataaaggaggaaattaaatgaggtatgaaacagaacaaataggaggggctttggtggtcaagctatacggcgagattgaccagcattgtgtaagcgagatacgtgacgacattgacagacagattgctattaggaatataaactcattgatagttgatttgggcggagtagaatttatggacagttcaggaatcggtatgataatgggcaggtataaaaatatggtcagccgcggcggaaaaatgatgcttgttcgtcctcagccacaggttgacaaagttcttgaactatcgggtattaaaaaactttttgaaaagaattgcggataaaaaggagtgaataaaatgaataactatatgaaactggaaataccatcaaagaccacaaatgaagcttttgccagagcggcagttggggcgtttgcagctcaggttgatttaactatagaggaactgtccgatattaaaaccgctgtttctgaggctgtaacaaattccataattcatggatataaagacgcaagcggggttatatttataaattgcaatataagttgtaaggatgacaagtatactattgagatagttatagaggataaaggaaaggggatagaggatatagatgtagcaatgcagccgctatatactacctctccgaatgacgagagaagcggaatgggctttacagttatgcagagttttatggatagcttggatgtaaactctgttttgggagaggggactaaagtagtaatgacaaaacgcattggagccgaaaatacttatgactaaattttctgaagcaaacgatgaattgctgagacggatttcggaaggcgatgagagtgcgcgggaggaaataatagagcagaatataggtcttgttcgctccattgtaaaaagatttttaggcagaggccatgaagctgaggatctgtttcagattggctgtatcgggcttattaaggctgtaaataagtttgacaggagctatggcgtaactttttctacttatgcagtgccaatgataataggagaaattaaaaggtttattagagacgacggtataataaaagtaagccgtgcgtataaggacatatcatacaaggctttcactgtcaaagaaagaatgatggcggaacagaagacagagcccactttggcagaaatagcaaatgaattgaatataactcctcaggagctgtcaacagcaatggaggccgcaaggtccccggaatctttgtatgctcagactgacgacggaaaatctgaggggcggtctttgatagaaaaacttccgtctgacgaggattatgaacaaaaaatagagaaccgaatattgcttagtcaggcgtttaaaggaatggatgaaagagagagaatgataatatatatgagatattttaggcagaagacacagtcagaaattgcagctgttttaggtatctcgcaggttcaggtttcgagaattgaaaaaaaggttctgatgaaaatgcgtgataaattaacaggatgatatgtaaaatttgtatatcctcagatattttaggtcataataattccagacagaataaaatggaaaaggagagaatttttatggccggatctcaaaaaaataaaaatcaggaatatcttgactatgtaaacagaacatcgcccaaaagtccaatgctcaaaaatatgctgctggcatttttatttgggggtctgatatgtgtaataggacaagcctttggagatttatacaaaaatgtttttcacatggatattgaaaattcaaagacggcagtcagtataactatggtgtttttgggagctttgctgacaggacttgatatatatcctaaaatagcaaaatatgcaggggcaggtactatcgttccgataacaggttttgcaaattccatagcttcaccggctatggagtttaaacgagaaggtcttgttacaggtatgtcagccaagatgtttgttgtggccggaccggtgcttgtttatggtataacaagttcaattgttgtcggaataatatattatctttataagatcttgataggaggttaaatttatggccgttcgtttaggaaagcagacaatagcacttgaagctccggtatctatagtaaatacagccacagttgtgggaaccaaggagagcgaggggccgttggctccatattttgatgttcatttgaatgacgcagagtggaatgaagaaacatgggaaaaatcagaaagcaaaatgcagagggaagctgcaaaactggcaataagaaaagccggaatggaacccggaaatatagattgtgcatttgcaggggatttgcttaaccagtgtataagctcgggctttagtgcgagagaacttgaaataccatattatggcttgtacggagcatgttcaaccatgatagagggattgagtttaggcgctataagtattgacggaggaggatttgacagaaccatagcagtagcgtcaagccacttttgcacggctgaaagacaatacagaacacctcttgagtatggcggacagcgtaccccaacagcacagtggactgtgaccggagcgggagcggcggttcttgaaaaaagacagtttccgccttatattacccatataacaacaggaaaggttattgactttggagtgacagaccccaataatatgggaggtgctatggctccggcggcaatagatacattaaaagcgcattttagagatacaaagagatcacctaaaaattatgatttaattttaacaggagatttaggaaaagtaggaagagagatagttatagatatgatgacagccggcggatttgatatggaacaaaattataatgacaccggctgtatgatatatgattttgaaactcaggatgttcatgccggaggcagcggatgtggatgtgttgccgttactctttgcggatatgtttttgaaatgatgaaaaagggtgagttaaatgatgttcttatattgggaacaggcgcattgttaagcccgacatcgtctctgcagggagaatcagttccgggaattgctcatgcgatttcactttcaacaacaccaggaggcggaaaaaatggattatattaatgcgttttgggtaggcggactcatatgcgtcgcagcacagattttaatagataagacaaatatgactccggcaaggattttggtactgtatgttgttataggaacaattctcggtggaattggcatatatgacaaacttgtggattttgccggagcaggggcaagcgtgcctcttgttggatttggcaatgttttggccaaaggcgttatgaaagcggttgacgcgaatggtcttattggagtaattacgggaggaactgcggcagcagccggaggtatagcggccgcaatattctttggttttttagttgcattaatttttgatccaaaagctaaaaaataatttaaaatacttcttaataaaagcatattactttataataatattttatatttaatttaagtttttgacttaagatttaaaatttgaatttaatgtgatttattattgttataagttattggttatttaaagtatttttgcttgttttaaataatatttcagaaatgtgacaaacgtttgatataaaccgtttattgtttttattttatggtaaaccgttaaaaattaacttaacatgaatgtcaatgttacaaaagtattaaaagatttttggttatgatataatgattaacgtattttcagtaatccccatagtttcttatatattacatttttaaatttgctttttggatattgaaatgataacatatcaatttgaaaagtaatatatatatgaaatcagagttaaaactttattaggaggtgggattattgatggagagcggtgcgaaacatgggcataaaaacagcgacgggacttttggaattatcaaaagagaagtcaggcttgaaggctccgctgaatgtgtagaatgcatatttgagggatttctcaggtgttgttatgaaatagaactgagggaacatgaattggttagtatagaatatttgctgactataggacatgataagtttcgccattatggaattaaagcaataatgagaaataaggataatgatattttagattgctctgttgctgaaaataggtttgctacactaactgaatgtattattaaaatgcagatgctggctaaagacaaagtccttccatgcactttgccttatgtagtataaattaaaccgtgttggtttttgtaatataaaaaaagactgccgcattagcggcagccacagaaaccaatatatacataaataaaaatcagtttattctattgtttggttggtgttgtcaacctgagcaggtgcgcttggaacaatatttccgctgtttctcatttcgtttctattatttctcacaatattaacacattgttctaaatctttcatagaagacataacgactttttcaacagtttcaagaagattgtctgcgtaattaaaggaagaatcagtaacttgctgtgcatttgaacgagcgttttcaataatctgattgccttgaacgatagctttttttgtaatctcgttctcgttgaccatggcaataatcttatcttcagcacttttaattaaattatcagcctcagtttgagcttcctgcaaaattctttgtctttcttctttaatccatttagcttgttttaaatcatcgggaagctttagcttaatctcttgaagaacgtctaaaagttcatctttatcaagaatacagcgtccggaaaacggcactgaagcgcctttgtcgattatatcctccaattcatccaacaattctaatgcatccatataaaatacctccttgaaatattaagccggtctagtattttgaattttcgaaacggctttttataatagggattaagttgtccggaacgagaccgttaagacatccgccatactttgcgatttcctttacgatactggaacttaaaaacatatattctttacttgagtgcagaaataaagtctcaagctcttcatataaggtttgatttgtaagcgccatttgaaattcatattcaaagtcggataccgctctaattcccttaataattatctgtgaatcaattttcttcataaaatctaccagcagaccggaaaacgatgttatttcaacattttctaagtcaccggtaacaagttttaacatttcgacccgtttttcaactgaaaacaaaggattttttgaattgttgacgagtacggcaacaactactttgtcaaagagttttgaagctctttttataacgtccatatgtccgtttgtgcaagggtcaaaactgcctggatataccgcagttctcatataatcacctctgcataaccgttattaccgttttgccatatctggatgattttaaaatgtcaaacccggtacttgttatgtcttcgccgtctgtctcagtttcggctactataattccattctctgataaaagattgtactcataaatcttattcagagatttaacaagaagccccttattatatgggggatctaaaaaaataatatcaaatccgtgtgtcaatttaaacggaatacttttgccgtctaaagtcaccataacgtccccgtcaaatagcttatccaaaaaattaattgcgtcagtctgatataggacagaaaactcctgaagacccgaaccattaaggttattgtttaccaattctgcggatttgcgactattttcgacaaatacagcgcagtctgctccgcggcttaacgcctctataccaagggcgccgcttcctgcaaacaaatccaaaaccaaacggcatggaaaacgcatttgaattatattaaacagggattctttaactctatctgtagttggtctagtgccgtcaccgagcggagaagcgagcttatatccgcgttttttaccagatataatacgcaaaacaaagtcccccttgccggaaatagagttaagtaatatattctatatatttatatatcaaatttgtaattttgtcaagcgttttaaacaaatttgtaactattaccaaaaaaagaaaaaagtcaaaaaataaatataccccacgattgccgtagaatggataaggtaaaaacctggaaaccaggtgggatcgactcaaaagcattacaagtccactgaatacccaaaggtatgaggcatgtgcgccgcttactgaagttttgatcccttataaaaattgttggttttacattattgccataaatacgtacaacgcagggaaatatttaattcatatcatattatatcatatttttttaaaaatacaacatttttttgattttttttgttacaaatttttggttttgtatttaagaaattcatttcgttaatgttacagggcgtttcgggaactttacaacctaataacaaattattatttccaaatatttaggattgaaataaaaaaatttttagttataattaattctatattaacatagattttattgagtatcggccgggtggttaaaaactgccgtactttaaattaccatttgctataatttgtctgttccgtattttgtatattgattagactaatattttttgtggttattatagcagaaaaattttcagggagattgttttatgaagattgagaagatcaatgagaataaaataaaggttttaatcgacattgacgaagcgaaagagtggaatgtgaatataaagaacatagcgtcaaatacacctgaaattcaggagatgttttggacagcgcttcgtcttgccgagaaggatgtggaattttcagttgacggagcaaaattatttgttgaggctataccgggacagacagaggggtttggaatgcttataactaagatatttagtgataatgacctaaatttggctgtttcaaattgttcatataagggtcgtgtcaaaaaaagaaaattgacgcctgggaggaatgagtgtataaaaagggctttggggaaacgtatattcaggttttgtgattttgaaaatgtttgccaggctgcaagtgcggtttatcgggattttgagggagaaagcactctttataaacttgaagattcatattatatgctgcttcttccaacagacagctcttctattattgggatagaaaaggttatgcttgagttttccgataaacagtctaagacgcttatatctcacggcagactcaatgaattgggcgagataatgataaaagaaaacgcagtaaatatattatcagaatatttttcataaactacataaaatatactttataaattcaaaatcggcagagtaataatcactctgccgatttttaagttatagctcttaatattaggttaaaataagtattaggtattaggataaaatacagcgtctaataattaagatttgtcaaacaagattattaccggcgctgattctaataacaaaaaatcttacatacgaatctatactatgactttgtacttaaagaagcgcaaaatacatatggattatataaatatcgtatgttcaacttatttgataaagtaaaacaagttaacgaaaataactataatgaaaataaataaaaatgtggttttgcaagcatcggtagggaaaacgaagtttgccgcgtaaggcgcgcagccgcggaaaagctattataaaaaagtttatgttaatattaagcggattgtttgataaacctacactttcaaaaaattacttagttgtggtgtatattcttgaacaccgagtgaggtgatcagccatatcacgtgaagtatgaacatacttagaataaattgacatagttttttaataataaacttttccgcggcgcgcgccttacgcggcagatttcatctgcccttcgaagcttgcaaaaccacatttttatttattttcattatatttgatcttatatttgccttaaaatttctgtccatatattataacatttccaataaatcagttttcaaattttgacagcttataatacctctataaaagttatattaataaaaattaaatgggtgtaaaatcaataatttgattttacacccatttttttagttttcttcatattaatgaaagattatgaatatgaatgatataactggattaattaaaacattttaagagaagggaagaacttttatggagaacaatgaatcaatgggaagacatactgtcactattgaagaccgaaaacgaataaaaataaattgcgttgaggacgtggagagctttaatgaagaaaaagtagtagtttatacaagcatgggcgtaatgatagtctccggatttgattttaaggttaaccgtttgagcgttgaggacggacagctaattatcgacggagaggtagacaaggtggaatatatggaagttgcagataatgacgacaggggaggctcaggatttttcggaaaactttttagataaataaattacggaggaaaaacagatggatacaattacaaaagcaaacgaattaaattactttttttggtcaatgatatgcggcgttgcaatgacaatagtttatgactttttgagagctagaagaagagaaaaaaagcaggttggattatttatatatatagaagatatagtttggttttgcgttttaggggtgctcgtatacttgcttgcattcagacagaatgccggtatgataagatggtacagtttttttggaataggactgggggcgcttatttataaactattgctcggcgacaaacttatgaacgtgtttagaaaatgttattcatattttgtcagggccttctgttttctaataaaaattataatgtggcctgttagatttatagcagctttaattaagcggccgattggagttgtagtgtggcattcaaggaccggctcaagacagctgtcagatatgatgaaagtgtctaaacagcggcttcgtaacagaatgagatataaggcaagaaaaacaaacagcagtgaggaagatgaataataaagctgtgattataaaaataactaataatgggtagaatatccaagtaattttgtattgtaaattatagtatttgagagactttttcattgacaaaacgtatttgataatatataatatccttgtaggtttgtaaatttattacataatcaaatagctgtgaagttttcactgctgttaggaggatgagcgtcggtgaattctgcgggagaaacaaggagaacagataaaaacagcagaaatttttcgtcggtaggcgcggccgctgcggatgttaaaagcagggcaacaaaaacgataaaaaagactaagaatgttaaattcaatataaaaaggctggttgtgtctgtagccgtactggttttctgtgtatattttgtttgcatgatgataggtcagcagagcacaatcaatcgtaaaaataacgagatacggaacctgaatgagcaaattacttcggctaaccaggaaactgaaaggctgaaggaagagcttgaaaatgtaaatgacccggaatatcttgagagaatggctagagagaagctgggacttgtaggtccgaatgagcgtgtttatattgacgctaacagcacaaactaaagttgagttttagactcacattttaattgagtattattaatttatataagcgagagtattctctcaggagggaaatttagtaagtatgcaaattgaagttggaatggttttaaatgtaaaggttaccgggattacgtcatttggcgcttttgttgagctgcctgaaggaaagtcaggacttattcatatctcagaaattgcatccgcttttgtggaggatgttaatcagcacttgaaaaaaggtcaggttgtttccgcaaaggttatcggtgttgataacggcaaaatcagcttgtcaataaagcagctggaatccggagaaaatcaagctaagccggaaaagaagccaaaagacagaacaaagaagaggacttcaagtccccgcagcaatcaaccgccggaagagtttgaattcgtgtcaaataagaatagaactgacgatttgagttttgacgatatgcttcaaaaattcaaaaaagacagcgatgaaaaattccaagatttgaagaggaacactgataataagagaagcggcggttataagagggcatactaacagattgtaggtgattttatgacaagtgccggtatattttggataattgcggcagttttgttcgctgtgattgaagctgccacagttgcgttggttacagtgtggtttgcggtaggagcacttgcagcggcaatagcagcgcagtttggagcaagtattttatttcaggtcggtacttttgttgtagtgtcggctattttgctttgcgttactcgtcctgttttcaaaaagatatctgtgaaaaagccgcagagaacaaatgcggacaggtttataggcgaagaggctatggtcattaaaaaaattgatgatataaataatgatggtcaggtaaaaatagcaggacaagtttggtcagctgtatcggaggataaaagtccgcttgaagagggaacaatagttaaggttattgctatcagaggagtgaagctggtagtagaacctattaattcataattttattgaaaataatttgattttataaaatatatttatgaggtgaagcagcatggtatttctaattatattactagccataattgttgttcttgttgtggcaaatataaagattgttccccaggcgcacgcatatgttattgaacgtttgggagcgtacagcacaacctggagcgttggtcttcatattaaaattccgcttattgagcgagtagcgaataaggttactttaaaggagcaggtagttgactttcctccgcagccggttataacaaaagataatgttacgatgcagattgatactgtcgtatactatcagattactgacccaaagctttatacctatggggtagagatgcctatgtcggcaattgagaatctgacggctactacacttcgtaatattattggtgatatggaacttgacgaaagtttgacgtcaagggatataattaatactaaaatgcgttctattttggatgaagcgaccgacccatggggaataaaagttaaccgtgttgaattgaaaaacattatccctccggcaggtatacgtgaagcaatggagaaacagatgaaagctgagcgtgaaagacgtgaggcaattcttagagccgagggtgaaaagaagtctgctattttggttgctgaaggtgttaaagaatccagaattcttgaagctgaggctgaaaaagctgctcaaattcttaaagctgaagctgataaagaagcggctatccgtattgctgaaggtgatgctgatgcaatcagaaatattcagcaggctactgcagacggtataagaatgctgaatgggtctgagccgggtgaggctgtattgacaatcaagagtttagaggcgtttgttaaagcggccgacggtaaagcgacaaagataatactgccgtcacaaattcaaggtatagcaggactggctacaactcttaaagaagttatgaaggattagttttactaaaataaatatgttattattcatttgcacagatgattttatttcatctgtgcaaatgctatgatatagataaaagacttaaattacagagatttaaaacataggaggaaataatatgtcaggacattcgaaatgggcaaccataaagagaaaaaaaggagcaatcgacgctaaaagaggtaagatatttaccaaaatcggcagagagctaatggtggctgttaaagacggcggacctgacccggacacaaattctaagctgcgtgatgttattgccaaagcaaaagctaataatatgccgaatgacactattcaaaggagcataaaaaaggcagccggagaaggcgacgcaggaacatatcttgaaatggtatacgagggatatggcccgagcggcattgctgttatggtggagactttaagtgacaataaaaacagaacagcggcagaccttagacactattttgataagaacggcggaaatttaggacagagcggctgcgttggatttatgttcgacagaaaaggtcttatagttattgagaagaccgactctgttgatgaagatactttgatgatggacgctttagaggcaggagccgacgattttaatgttgaggatgagtgttatgaaatcctgacagctccggaagcgctgggcaagactagagaagaattggaaggcaaaggctatacatttgcacaggcagaagtaaattacatacctcagaccactacgaaattagataatcctgaggacattgtcaaaatggaaaaactgatagatatgcttgaagaaaacgatgatgttcaaaatgtttatcatacttgggatatgccggacgacgaggaataatattatttatactgagctgcaaaaaaacagagcggcggctgaaaatgcggcgtgaatctgtttttctgcggctttatttataggaggtgaagtttttggcacgtatactgcatatggcggatatgcattttgattctgcctttacctcaaacctatcaattgaagaatcaaaacttaggcggagcgaacagcgcgaagtcttttcaaggataattgaaatggttaagaccgaacaaattgatgttatgctgatttcaggagatttgtttgacagtgagaaagtcagcgaagaaactattaactttatggttagaaaatttgacgagatttctgaaatacctgtcttaattgctgctggaaaccatgacccttttaatatgaattctgtttatgaaagaattagtttgggtgataatgttcatattttcagcatagaaggtggattttatgattttgaaactcttaacctaagagtttccggagtcagctttggcagcgaggacggaagcaatataaaaattccgaaaacacttcatcctgaattttcgaatatacttgttatgcacggcaatgttgtttccggtactgctgagagcggaataagatataatcctgtgaccaaacaagaaatagaaaactcaggatttgattatatagcttttggacacgttcattcttttagcggtataaatgcggaaggcagaacatattgggcttatccaggtatacctgagccgcgcggctttgatgaaagcggagaaagcggagttgttataggaaatgttttaaaagcgggttcagaatttaacttacgtaaagtttcaaagagaaattattatatattagaaattgagataacggcagatatttctgataacgaacaaataatcgagcttattgactgtaagataaaagagtacggcaaccaaaatatttttagaataatccttaatggcaaaattcagtcagacttttatcttgatattgatttgttgaaaagcaggaccgaaaagcttggtttttttgttgaaatcaaagatgagacagaaattgagtatgatttgacagttgactgccaggataacagtttaagggctgaatatataaggttgatgcagaaaaaacttgatgaatgtgtgcacggaacacgtgaatatagaattattgagaacgctgttaaatatggtttagatgcgatagaaggcaggcttaaaccataaagaacggaggtgagcaagattagaattacccggttagaattaattaagtttggaaaattcgttgactattctattgatatcagcgatggaatgaacgtaatatatggggataatgaggctggtaaatcaactattcagctttttattaaatttatgctctttggtattccttcgagaggcggaaagagagaaaaaataaaagacagagagaagataattccgtggcaggataataaggccgccggaaaactctttttgataaaagacggcagagaaatagaggtataccgggagttcagaaaacgtccttccggagatatagtaaaagtaaccgacaggaatactggagaaaattactttaacaaggaaataaagtctgaagacgtcggcgttttgctgcttggaatgagcagacagatgtttgagcgcacagtttgggtaactcagagtagtatttgtatgcagggcagtgatgatgaaataaccgctaggcttataaaccttttggagagcggcagtacaagtgatgtttcaattaaaagcgctgtcagtgggattgaaacaaaaatagcaggattaaaggcgaaagatggaagaagcgctccgggcgaaatagatttgcttaaccgagaacgtatagagttaaataaaacgctgtctgaacaaagggcatccgagagaaagagaaatgaagtaaatcaagagattaactcgcttactcagcgtaaattaaaaattgacgatgaaataaagcatcttgaagcggttgaaaaatctgagcgggcaaaagaaaaaatattgcgtgttgacaggatagacggctgtgttcaaaaagaaatgcaaattgctaacacaaggcagtttcagctttttaaacacaatgctgttcctgagagggttgaaagtttacgctcagattctgaacatatagatgaacttgaggtaaaggcatatcagacgcagcaagaacttttagctgaacaaaactgttttgcagcagaagagaaaaagagaaaaagactgttatattttttaattggagctgccggattggctgtagttttaactgtgttaggttttgtgttcggagtgggaaaaaatatattttattggataacagcaggagcagttgtattatttctaattgctgcaggaattattttcggttgcattattcataacaatatagtaaaattaaaagaaagtttaataagtgttggcaatgaactttcacttataagaaaagagatttctgaaactgaaaagagattttcagaaagtctatctattttggaatgtgatactttaaatgattttaatgaaaaatttaggttatattctgaggataaggcaaaaataaaaatggtaagagaactgtatgaagaactcttgggtcaagatgattatcaggagttaaagagagaggcagataatcaaagaatgtttgttattgaatctgataatgctgaaactgacaatattgaacaaaaactggattcattaacaaatgaaaaggaaaagatttccgggcgtattttggagctgaaacagttgaagagcgacggaagtttggaaattcctttgagtgatattgaaaataatataaagtttattgatgaacaaattattgaaaaggaagaggagtattcatcataccaagcggcgaaagagggacttatccaggcgtatgcaaaaattaagtcggattacactccgctgctgaatgcagagacagaaagaatattaacccggcttacgggaggccagcatgacagtataaaagtggcagaagatttttcactcagcttaaaagaaacagataaaaatattgatttgaaacaggcggagttttttagtacaggaacatataatcagatttatttggcacttagactggcaataattaaacttactttaagcgcttcaaacgcagtaatatttttagacgatgttttaacaacatttgatgacggcagaagccgagacgcgcttgaagtaatcagagaaatttgtattaaagacgggtatcagtgtttattattcacttgtcatcaccgtgatatagagagtattaaaaagtatcctgatataaatataatggaggtattattatgagcgggaaatttgacaattcaagaggaaatgtgaaaatagcgaacagcgtaattgctaaaatagccggttatgccgcaacaagctgttatggagttgtgggaatggcaacaagcggtggcaaggacggtattgcgaaactgcttaaacgtgaaatgatggataggggcgttaaagtaaagttaggcgagaacggtatagacatttctctttatattattgttgagtatggcacaaatatcaatgctataggcgaggttataaggagcagtgtaaaatatagggttgaggaaatgtccggcttaaatgtgaatactgttgatgtaaatgttgaggggataagagttaactagagcggattttataagaaggagaataaaatgatacagcttgacagtaaaagtttaaagttaatgatagcttctgcatcaaatcagattctaaacaatgtcgagaaagtcaatgatatgaatgtttttccggttccggacggggatacaggaacaaatatgagtatgacgttcagtgcggcagctaaaagcgttgttgatttggataataaaaaatctccggttgaaattttggaggttctttcaaagtcggctcttagaaacgccagaggaaattcaggggttattttgtcacagattttaagaggtttgtggcagggcgctgaacaatcaggagaactggatgttagcggagtgaagcatgctttatgtgaagccagagacaccgcataccgtgctgttatgaaaccgaccgagggtacgatactaaccgtaatacgcgaaattgcggagtatgcggaagctcattttgtggagtatgatgatgtcactttatttttgaaagctgttcttgaggccggtaagaaaagccttgccaaaactaaggagattttgccagttctgaagcaggttggggtagtcgacgccggaggatttggcgttataatacttctcggcggcgcggtaagcgctttggaaagcggcaaggcggcggaacttgaagagagaggcaaagcgaatgataaacaaattgcgtctcagggtataaaaagcgctgaagctgatactacagaaataaaatttagatattgtacagagtttttgataaataaagacagcgagcgaagcgccgcccagttgatggcggccattaaacaaaaaggcgattgtatgctggttattgatgacgatgaaatcgtaaaggtccatatacacaccaatcatcctggttttgtgctggaacaggctttgaagcttggcgaacttatcaatataaaaattgataatatgaaatatcagcataatgaaattgttaacggaagcaaggaagaggatgagctttcagatgatgataccgaactgaagaaatatggatttgttgccgtatcttcaggtgatggtttgagccaattgtttgaaagtcttaactgtgataaaatagttgcaggcggtcaaactatgaatcccagcacacaggatattttagacgctgttttagatgttaaagcggaaaatgtttttgttctgcctaataataaaaacattatacttgccgctgagcaggtgaatgaactggctgatgtgaatgtaatagttattccgactaaaaatatgcctcagggtatagccgctatcgcagtatttaacgaagacgcagacttggacgagaacatttctgtgatgaatgagagtgctgatttggtgaaatgcggacaggtgacctatgcagtaagagacactaagattaacggagtggatgttgaaaacggagatattatggctgttattggcagtgatttgtctgtggtaggctctgatgttaatgaggtggcaaaagagttagctgaaaagctggtagacgaggacagcggtgtaatctctatatattacggcaaggatattgaaaaggagaaggcaacagaactttctgcttatttagagaacaaatattccgatttagatgttaatttaaattatggcggtcagaatgtctattattatataattgctgtggaataagtttatttttaactataatttatatattcagagatataataacctttatatctccattttgtttataaaattcaaaatcggaaagttatgatagcaactgataaatggtgtgatgaaaaatataagacaattttagcttcgtacatatttatggtaataatttgtttggtttgattgaattagataaacgacatctattttgaatttggactgtggaatggtgaatagttttgtttgacagattggctgagcggtgagaatggtctttacgattgtactaaaatgtttattaaaaagactttcgaaaatttcactgatttatgccgtgatgagataataaatgaacagtgcttggattgaagaataaactttatggaaccgtgtattgctgatcatggctgttaaaatgcaaagctataaaagctggataaaacaggactttaaaaaataaaaatgctgttaaaaggaagatttttatgttgcttagtgacagtgtacagtatttaaaaggaataggagaaaaaagagccgagctttttcataagctgggtattttcaccgtggaggatttgttatatcatctgccgagaggatttgaagacaggacaaatataaaagatatttcggatttggcagaaggggaaacagtttgcgttaaaggcgttttggctatgggcttaagaaagttcagagcacggaacggcacttgggttattcagaccagactctctgacggaagcggagttatgcagctgacctggtttaatgctccttatgttgaaaaatcgctggaggacccgtctgcagaatatattttctttggcagagtttcctataggagaatgtctcctgagatggtgaatccgataattgaaaaagtggacagcggcacttccaaaatggggaaaatagttcctatatatccggccacaggtggattgcagcagagaagtatcagggacgccgtgacccaggcggttttaaaactcggcgaaaagcttcctgaatcccttcctgaagagataagacaaaaatacgatttaatagatatagagagagctattcgttcggtacatatgccggaaacttttgatgatttttatactgccagaagaagactggtctttgaggagtttttaaaactgcagctaggtgtggcaaccgttaaagcgcataaacacaaacagtctgcggttgttatagaaaatgtgaaatgtattgcggattttgcggcttcgctgccttttgagcttactaatgcacaaaagagagtaataaatgaaatatctgcagacttaaaaaattcggttccgatgaacaggcttgttcagggcgatgttggttcaggtaaaacaatagttgcggcggcgtccatgtttgctgtggcaaaatcgggatatcagtctgtcatgatggcgcctactgaaattttggcggaacagcattttgccggtttaaagaaatattttgaaccgtggggaataaaggttgcttttttaagcggaggacagaaggttaaagaaaaaagagaaaatcttgagctgattgaaagcggtgaagcttcggtcatagttggaactcatgccgtaatcacggataaggtgaattttgctaatttggctttgagtataactgatgagcagcacaggttcggagtcagccaaagaacaaaattggcagggaaaggaataaacagtcatacgttggttatgacagctactccaattcccagaacgttatctttggttatttacggggatttggatatttccattatagatcagcttccgccgggaagaaaagaaattaagaccatagctctgacagaagctagaagagcaaaaatgtatgagtttattcttcaggaattaaacaaagggagacaggcatattttgtttgcgctcttgtggaggattctgacgcggttagtgcaaaagccgcaactgattatgtaaaaagattaagcaacggtgttctgagaggaaagagcgttggtcttttgcatggaagaatgaagtctttcgaaaaggaagatataatgaaacggtttgcggcaggagaaatagacgcacttgtggctacaacggtgattgaggttggtgttgatgttcccaatgcaaccattatggttattgaaaacgctgagcgttttggactttcccagcttcatcagcttaggggccgggttgggcgcggcgctgaacagtcgtattgtatcatgtttggcgaccaaaaaagcggtgtggctaaagagcgtatggcggtaatgtgtgaaactaatgatgggtttaaaatagctgaaaaggatttggagattaggggaccgggagagttttttggaacccgccagcatggtttgcctgaaatgaaaatcggcaacttttttactgacatggatattctcaaagagacacaaggagctgcggcagaaattttgaaagaagacccaatgctggaaaataaaaagtatgatatattaaaccgagaggttgttaagacatttaataaagtgggcgatgttttaaattaatattttatatagataaatttgtttaggatttagaatatatgtattatattatgtgcggttgcttgaatttaattaattggataaattgtcgaaactctatgaggcattataattttaaattattttgtgattattcttttgaattagttttattatttatattagaggttctgatatttttttcaaaattataaagtttagtctgatatataaaattgtcagactaaactatgtttggtaattaaattttatatttaaatgctgctgtcatatataaattttttatgtgttttactaataaaaattgatggtgtgagttaagataattttagttgaaaaaaatcgctgtctgtgtatgggtggtcatattttattgataagtcttcctgactaaccttattaaacccggccttttcatagaacttgtgtgtcctttcggtatttttgggagtgtccaaaacaagctccttaaatttatgctcatatgcaaaatcaagtaattcagcaaatagttttctgcctaaattataaggttttccgcggtattgctcatttacaaagaatttttttaatattccaatatcgtttccatagttcataagtccaatagttccgattagtttgttgtcctctgatgctatccaaaaatagccgccgtttgtgaaatattcttgatttatatttagcagttcaggttggtctgcaatactgactattggccttgtgccatcgttttggcagctcagcacgaggttgataacctcatcttggtatttgtcttcgtatttctttatttcaatcatttttgtttctctccaatatctaaaaattacaaatgattttgaaagtcctttatataaatataaaaacagttttgctaagtatatagattgttaacagtaaaattattaaataataattttaaatcatttgtagtacaaaatcggaattgctgtatttatatattagtttagcaaataaaaattaaagttttatgtaaaatgggtaatatatttgaaaacttagctttttttaattatattatttttatgtataaagattatactgtatattttattgttcacttttatatttcttctataaaatgcaccggatatttatcccagtattttttatatacataacctttgttattatttatatcgaattgatacattctgaaaatgactttgatattttttggctgccattgttcctcataagaatacttatatttcataccgacttttttcataacttcaccgctgccgggattttttatatcatgtgttgccgtaatatacggcaaatctaaagtttttaaatatttaattaatgcggccgcggcttcagttgtaatcccttgattccaatattcttttcttactgcatatccgaggtcatgactttcatcatggctgagttttatgtatcctatagggatattattagatttcagacatatggcatagattaaatctttagaattaattatattatttaaatattcttctgcctcatcaatactttttataggaaatataggcagaaacgtgtttacctcattatcacttaaaagagtgaagagcgcctttgtatcatctttattaaactctcttaaaacaagccgctttgttttaattatattatattcctgcataatattatcccctttatttatattgttaatttccccgtttgtatatccctgttatatttccgtattgaattatatgtccgtttgccgccgttaaaaaatctctctttttggaatccggattcaaatttaaaaaacagtcaagcgcgtaaatatgaaatatatatctatgatagtttcttataaaaaatggctgtttaggtcctttgtattgattacgcccgtatcctatcccctgctttgcgtttcccaaagcagtaacaagttttccatgaggtatgttttcaggtatttcatttaccgccggtatattccaaataatccaatgattaaatgcttttataaaaggaatatctaagtcgtccataacaattgcgatagaggcggcgtttttgcttagtcctgatatagtgaatggaggagatatatcttcaccaaatccggtatgccttttagggataaatgaattgttgtcaaatgatttgcttgtaatttctaaagtattttctttaatagtcatgataaatcctcttttattttttctttaaaattgtcacggcagcataatgaagaatttcgaatttttcaggagcaattgtttcgagcatttttatatgttccttctcaaatttttcaatttcagcatccgtcagtgaggcgccgataccgcggcaggccttcatacgtccgttccaggattttctggtaaaaggcacatttatatcaaacacttcgcttttttctacttcgaaatactctgtataatcatcatcaatctgaatgttatggcgggtttcccttccgcctgtccaatctggattatattttaaaataagattttcactttttcctgctatggcgtcttcaaacggaagccacgccatatataaaattacaaacttacctgatgctttaagtattttgtgtattttaggagcaagcacagggtgattaaaataatcaaagcactggcatgctgtgactatatcaaatgattcaggggcaaactgaagttcttcggcaggagaagagaaaaattcaatatccattttatctttttcggcgagaagtttagcatgttttatctgatttttagatatatctataccggtaaattttgctccgtatttatataggttcctgggcagaacacctgttccggtgccaatatccaaaacattctgaccttttgtgcagatgccgttttttattagatactgataaaattcatcggggtaaatatctctgaattttgcataatcatttgaggtcctcccccaatcgaaaccttttccgccgtcaatatttttattaataatcatttttacctccggtataaatatggtattgttttgtatttattttagcttatttagtaaatgatggtatgtaaatgtctttttagaatttgattaatgttttgtatattataggaaaaacaattattatttaaaacaaatcatttgaaattatgaagtataacagcctagtaagaatgtgagtcatattatgtgattttatatttaaaaaatataattattttacaggtatgtagtcaatagctgattcctcatcagtttcttcaagtttgaaaataaccggccgtagaccgtcattacagctgcaaattgctactcccggtgtttttatccaatcgccgtaataaaatgtacccacccccgcgccatgcgccagtgcaaaaacatactgatatatagctttccaggcctcgtcgcataatccatcgggttttgcataatccgcgtagaaaacctgtccttttttttacattggacaggcggttaagttatcggctccatattccattgccaattctttatctaaggtggtttttaacattgttatttttacctttttcatatttgtgtcctctttataaagataaattatatatcaaaccgacctcagcattactggcgctgaggtcggtttaaagaagatttatttttcaagtaatgattctccggtcatttcgtcaggtttctccagccccatcatatctagcaaagtgggggttaaatcagcaagacggccttcttttaatttagcgtcttttctgccaatcagtatcagcggaaccacatttgttgtgtgggctgtaaacggctcgcctgtctcatagtctaccatttggtcagcattgccgtggtcggcagtaatcagagcttcgccgcccatttccaaaagagcgtcaactacttgacctacgcagttgtcaactgtttcaacggccttaacggcagcttcaaaaactccggtgtgccctaccatgtcacagtttgcaaagttcaagattattgcgtcatatttgccgctcttaatccgttttacaacttcctcggtaacttcaggagcgctcatttcgggctgcatatcataagttgcaactttaggcgagtttatcaatgctctgtcctcgccctcataaggctgttcaacaccgccgttgaaaaagaaagtaacatgtgcatatttttcagtttcagcgatacggagctgtgttttacccagtttgctcatatattcgccgaatgtgttagacagcgattcaggcttgaatgcaactttaacatttggcatagttgcgtcatactgtgtcatagtaacaaaataggtgttgaaaaagtctctttcaaacccttcaaagtttggatcaactattgttctggttatttctcttgctctgtcaggtctgaaattaaagaagatgacggagtcattctctttaatggtgccgagtggcttgccatccttttcgataacgcatgggacaacaaattcgtcagtgactttatcattataactattctgaatagcctctacagcgctttcggctgtattacctattcctcttacaagagcgtcataagttttttgaactctttcccatctgttatccctgtccatagcgtaatatctgccacttattgtggcaatgtcgccaacgccgatttcacgttcctttgcgataagctccttaatatattcctcagcggaggaaggggggacgtcacgtccgtcaagaaatccgtgtacatgcacatctgtaagaccgtttttctttgccagctctagcaatccatacaggtgattttgatgactgtgtacaccgccgggagaaagaagacctaaaatgtgcagtgaactattgttcttcttacagttttcgatagctcctatcagtgcttcgttagtgaagaaatccccgtcagcaattgattttgtgattcgggtaagttcctgataaacgatacggcctgctccgatatttgtgtgtcccacttcggaattgcccatttgaccgtcaggaaggccaacgtccattcctgatgcgtgaacaatagaggtggggcattctttcatatacttatcaatattcggtgtgttggcagcatatattgcatttccgtcatgacggctgttttcaccgaagccgtccataatgattagcgcgtatggctttttgctcatattcatgtctccttaaattcgttttgttagtcagcggctttaatgatagctgcaaaatcatcgggtttgaggctggcgcctcctatcaaacctccgtcaatgtttggcatagacaagagttcttccgcgttgcctgcattcatgcttccgccgtattgtattctgattttttccgctgtgtcctcgccataaagttccttaatagtatttcggattataccgcagacttcgtcagcttgctgggctgtggcggttttgcctgttccgattgcccaaattggttcataagctataattatattttcagcgtcgtctttctgaatattcaggaaagcaagttttgtctgccggcatacggtttccggcataattccgttttccctctcggaaagactttcgccgacgcagactattgggataagaccgccgtcaacagcagctttagttctaaggttgacggtttcatcagtctcgccgaagtattgacgcctttcactgtgtccgataatagtgtataaggctcctgcgtctttcagcattgcggaagaaagttcaccggtataagctccgctttctttaaagtgaacgttttgtgctccgacgcttatgctgcttccctccaaagccgatacaacgcccggtatacaaacagcggtgggacaaacgaccacgtcgcattttgcatctgatactctgtcgcggatttcagaagctaaaactgctgcctctgaaggtgttttattcattttccaattgccggcaatgattttttttctcattaaattccacagcctttcttttatatatctcaactcttattgtataaatatatatacaaataataattagaaatgttcatataattttaaaactatttatataggataataatttatttatcatcaagagcagcgcatcccggaagaattttgccctccaagaattccattgaagctccgccgccggttgagatatggctcattttgtctccgaatccgagaatatttactgccgccgcgctgtcgccgccgcctataattgttgtagcgtctgtatctgccagtgcttgcgcaaccgcaacagttcctttagctaaaatcggattctcaaatacgcccataggaccgttccatacaactgtttttgcagtctttacggtatctgcaaaaatttctcttgttttttcacctatatcaagacccattttgtttgcaggaattgcgtcagcactaacggtttcaaccggaatttcagcgtcaatagggttaggaaactcagctgcaacaactgtgtctacaggaagaagcagagtctttcctaaactttcagccttttccatcatttctttgcagtatgagattttttcttcatctaccaaagatgttcctacctcataacctttagcttttagaaaagtatatgccataccgccgccgatgatgagagtgtcgcatttttcaagcagagttgaaataacattcagcttatcagaaactttagcgccgccgagaatagcaaccaaaggtcttaccggattatcaattgcgttgcctaggaaatctatctctttagcgagcagatatcccgaaacacatgggctgaggtattcagtaactccaactgtagaacagtgagctctgtgagcgcttccaaatgcgtcgtttacaaaaacttctgcaagagaagccaattctttgctgaaattttcttcatttttggtttcttcaggtctgaatcttgtgttttgaagaagaataacgtcgccgtcgttcattgcagcaacagcagcctttgcattttcacctacaacattgtcgtcatcagcaaatacaacatctttgccgagtttttcagacaggcttttggcaacaggagccagtgaaagactttcaactacctgaccttttggctttcccatgtgtgagcaaagtataacttttgcaccttcgtcaacgagtttctgaattgtcggcatagcgccgtttattctcgtttcgtcagtgatttttccgtcttttataggaacattaaaatcacagcgtaccaaaaccttttttcctttaacttgaatgtcatcaacagtttttttattcattaaaatacctccaaaaatatgttaagatttaattatttttaatttgttaaggtaaagcattaatgtaattaatttatttatgcttatttactaaggataattttaccctaaccgcctaaatttatcaaccctttttttctaaaaaaacttctcaaatttgtaaaaacagcaggcaagagtttgtgaatgttttaacaaattaaattataaaaaatatattgacaaattctgtaaacggtgttatcctaaaataagtatatgtatttttagtatacattatatattttacatattagggaggatgttcttgtgagaacaaaactaaaaactaaagatttggttatttctgcactattaatagccatcggaattttaataccaatgatttttacgggtccgccgtttagaattgttgtaggaccgtacagcgcaacgcttatggctcatgttccggtgattattgctatgtttatctctccgtggactgctgtgttcactgctgttggaactactattggatttttctttacagctccgctggttgttgcggttagagcggcttcacatatcgtgttcgcaattatgggcgcatatatgctgaaaaagggtatgaatcttactgttacaggtttggctaccggggtagttcatgcagtgtttgaaggaatagttgttcttatattctttgctgtaggcgcgtctacaagcagcagttattcaaacctggcaatgatgtggataacaataggaggaacatttgctcatcatatagttgattatgttatagccgttattgttggctctgccctttcaagagctcatatgataccgtcgcttccgccgatttggggcaaaaagcagcttgcaaaataaagtgttgattatttataccgccgtgtattcggcggtatttttttctttgatgattattgttcttgaaaatactgagcaaatatgatatattaatatctgttaagaaatgaggtgaagcagtaaaatggaaaacgagtttttaatgggaaatgaggcaataggccttggagctatgcacgccggggttaatcttgtatgcggatatcccggaaccccgtctactgaaatattggagagtgttgcaaaacgcaatattgataaatcagtttatgttgaatggtcaataaacgagaaggcggctatggaagttgccgccggagccgcatatgccggagcatatagtatggttactatgaaacaggtcgggcttaatgttgccagcgacccgcttatgagcttagcctatgtaggaataaaaggcgctatggtggttgtagtggctgacgaccctgggccaatatcgtcacagacagagcaggatacgagaacgtttgcgatgtattcaaagctgcctgtatttgacccgactactcctgaagaagcttatgagatgataggcgaagcgttcgaatattctcataagtatggaacgccggtaatattcagacctaccacaagaatatgtcatgcgtgtgcttctataaagcttaaatcaggagatgaaataaagaaaaatacacctgacggatttgttaaggacactatgagatgggtgatatttcccaaaacttcatatttgaatcatataaagattgagaacagaaataaggagctttcaaaagttttttctgaagaatatcaaagaaatgagtattctgacaatggcgatacagttttgggtattgcggcaggcggagtaagctacgcttatgttaaggaggctttgaagcttttgggcgatcctaatgtgcgccttatgaaagttgcgacgccgtttccgttcccggaagaaaaagcgattgagtttatgacaggattaaaaaaagttatcgctattgaggaactcgacccggtgattgaaagggctcttttacatatttgcggaaagtatcatttggatgttgatattgttgggaaagagagcagtcatgtccagtgtgccggagagaatactgttgagagtgtaaaaaaagttattgcggaatttttgggtattaaacttgaagagacgaagagtgatgatacagatatgcctgaactcccggtgcgtccgcctgtgctttgtgccgggtgtcctcaccgcgcttctttctatgcagttaagaaggctgctgagggaaagaaagctgtgttcagcggtgacattggatgttatacgctggggaacgccaaacctcttgatatgactgacacatgtttgtgtatgggcgcaggtattacagtggcgcaaggcctccatagaatagaagatgatgctttaaacttctcatttgtaggagacagcacgttttttgcgtcaggaataaccggagttataaacgcagtttataatgagactgatataatcattgttgttcttgataattccacaacagcaatgacagggcaccagcctcatccgggaaccggaaaaactatgatgggcaatgttgttgataaagtagatataaaaaagatattggaagcagtcggtgtaaaacgtgttgagaccgccaatccattagaccttgaaaacgctgtaaaaaccgtgcagtcacttatggatggaagcggtgttagggcggttatatttaaggctccgtgtattgcggttgccaaaccggacccatgctatacaattactgatagctgtgtgtcatgcaaaagatgtatcacagagctggggtgcccggctattgtgcttaaaaatggagcgccgtatatagagccgtcgctgtgttatggatgcggtctatgcgagaaagtatgtccggttggagccatcaaaggaggcggagaaaatgaaagataagataaattgtcttctttgcggcgtaggcggacagggaacggttttagcttcgaggatgattgccgcagccgctatgaagagaggtttgtttgctgaaaccgctgaaacaatcggtatggctcagagaggcggcagcgttgtcagtcatgtcagggtcggcgagaatcagtattctccgctgataccatatggaaaagcggatattataattggatttgagccggcagaggctgtgagatgtctgccttatctaaagaatggcggaacggttgttgtgagcagcaaagcggtgatgccggtgactgccagtcttggtatgggaagctattccggttcagaagatatgctcggctatctggataataaaacagaaaatttgatagtcgtggatacagatgagatttgcaaaagattaggtagtgcaaaagtgatgaatatggtgctgctaggagcggcagcgtcttcaggcgctttaggcattacattagacgagcttgagtcggctatggccgagagattggatgagagattccacgagcttaataaaaaagcgctccgtgccgctgtgcaggagtaaattattcggagagtgagagatttattatgaaaatgacgcaggaacaatttgatattataaaggctcagattaaaaaacttacagctatggattgtttttataaagagaaatttgatggaattgatgttgattcgatacagtcccaggaagattttgaaaaacttccgttcacctggaagggtgatttgagagaagcatatcctttgggattaatggcggtacctgaggaggagatagtaagaattcattcgtcttccggtacaacaggaacccccgttattattccttacacaaaaaaggatgttgaggattgggcaaaaatgtttgcgcgctgttatgagctggccgggataaccaataaggacaggattcatattacgccgggatatggtctgtggacagccggaattgggttccagctgggagcggaacgtttaggcgctatggtaattcctatgggacccggaaacactgataaacagcttcgcatgatgcaggatatgaaatcaacagttctatgcgccacatcgtcttattcgcttctgcttgcagaggaaatagagaaacgaggaataaaagataatatctgtcttaaaaaaggggttataggttcggagcgctggggagaaaaaatgcgcggccgcatagctgatgagcttggtgttgaattgtatgatatttatggtttgacagaagtttatggacccggtattggtatgagctgtgattctaaatgcggaatgcacatgtgggatgattatatatatttcgaaattgtggatccgaaaactggtgaggttttgcctgacggtgaggttggggaattagttataacaactttgaaaaaggaaggcgctccgttaatcagataccgcactcatgaccttacaagaattatgaccgggaattgtccatgcggttcaaaatatccgagaattgacgttatactgggcagaactgatgatatggtaaaggttaaaggtgtaaatatcttcccaagccagatagaggagtttttgagtacaatcgaagatgcttcaagcgagtatcaggttatgatagaccatcttaacggcaaagatattttcactctgtttgttgaggttaaaaacggaactgatatgaaggtttttgaaagaaatgtagttaaagagtttaaagaccgtataggaataacgataaagtgtaaaccagtatcggttggagatttgccgaggagcgagaaaaagactgctagaatatacgataacagatattaatatgataagtcctgaacagatataattgttcgggacttattttttataattttgcttgtgcaatatgcacaaaaatatttttgaacattgtgcagttttcggttgaatgttttattaaaatgagttaaaattaaaaagacagtttggaacgtcattatgttcctaaaaagtaataaaattatagtaaatattaaaatacatattttggagggctgaattttgaaacaatacgagacatcaaaaattaaaaatttctgtttgctgggtcacggaaactcaggaaagaccagccttgctgaggcaatgctgtacactgccggaaacattgacagaatgggaaaaacgcaggaaggaacaacggtcatggattttgaccctgaggagataaagcgtaagttttctatttctgcatctctcgcttcgtgtgagtggaatggtactaagtttaatatcttggacacgccgggatattttgattttgtcggagaggttcagcaggctttgcgggtatctgacgccgctattatagttctttcaggaaaatcgggtttgacagtcggagctgaaaaagcctggaagtattgtgaagaatatggtattcctaaaatgttctttataaataaggttgatgacgaacgtgtggattatcaaaaagttttgcagcagcttaaagataagtatggcaaaaagatcgcccctttccagctgccgcttaaagagggagataaaataaccggatttataaatgttgtcgagcaggaggctagaatatttgacggcaaccgtactataaccggagaaatgccggcaggtattgaaggcgagctggagccgctccgtgaaatgattaaagaagcggtggcagaacagtccgaggagctgatggacaaatatttttcaggtgaagaatttactttgcctgagatgtattccgctcttcgcgagggcgttgctgaaggcgatatagttccggttctttgcggaagcgcttatcataatcttggtataccgtctctgcttaatgcaataagcgcatacttcccgtctcctaatgcaaaagaggactttataatagccaagaaaaaagacggcagtgaatcccgtataaaggttgacagcaacgacccgcttagtgcgttagtgtttaagacggttgctgacccgtatgtcggcaaaatgtcatactttaaagtcttttccggagtgatgactcctgatactacggtttataatatgaaccgtgatgtaaacgagaagataggaaagatttttactatgcagggcaagaagcaaattgaggtagagtgccttaatgcaggtgatataggtatggtctcaaaattatccaaaacaaaaacctgcgacacgctcagcggacttaatcacccatatcagcttgagggaataaaatttgcaaagccaaatatggagcttgctgttgttgccaaaaacaagggtgatgacgataagatagcccagggattgataaaactgatggacgaggataaaacatttgcttttgaaattaacaaggagactagacagcagcttttaaaaggtcttggcgaccagcatattgatgttattgtttcaaagctaaagaataaatttggtgttgatatatcatttgagaaaccaaaggttccttaccgcgaaacaatcaggaaaaaagttaaggtagaaggaaagcataagaagcagtcgggcggtcatggtcagtatggtcatgtatggatagagtttgaacctacggattcagaaggcttggtgtttgaagaaaaaatattcggaggcagtgtgcctaagggatatttcccggctgttgaaaagggtttgcaggatgcaatggagcatggtgttttggctggttacccaatggttggtttaaaagcaacgttggttgatggctcttatcatgatgttgactcctctgaaatggcctttaagatggctgcaaacttggcgtataaggccggtatgcctcaggcatctccggtaatattagagcctatcggtcatttaaaagtttatgctcctgatagttataccggtgatatcataggcgatataaataagcgccgcggacaaatgcttggtatggagccggtcggcgatggtataactatgatagagggagaaatccctatggctgaaatgcactcatatgcttccgatttaaggtcaatgacgcaggctaggggcgactttgagtttgagtttgacagatatcaggaagctccgcaaaatgttatagataaaattgtggaggagagcaaataaataacataataaattcaaatgttattgaatggactcagaaaaaattaacattagcaaatggcaccttctatggcctattttaccatagaaggtgttttacatgtcatgaataaatgaataaaaaatagataataagtaagatgataagctttctttaacatttttaaataataaattttatgttttaattagtgttttggaaaactaaaattttaaggtcagataattcgcatttcatgctcagatgatggttcacctaacgtgcgaacttcgttcgcaatacatcacaactaagttatttattgacattgtaggctagataaaacaaagcactttgtatcacacccaccattcaggtggggtcacgcctcccgatgttcaccattttacccacttttattatatgtaaattaattatatatgtatttgatttcgaaactaaaatttatattataaattagtttatgttgtcctattaggttggtttgagtgaattttaattagttagttttataattcgcatttcatgctcagatgttggctcacctaacgtgcgaacttcgttcgcctaccgatgttcaccgtttaaccacttttattatatgaaattactttcaaaatcaaaaattatattataaattgagtttagtttattttgtttagtttgattattttaattttatttatatagttttatattttatgtttgaagagttaatgtgttcttttgagttattcaattaataagtttatttatacaaaattgttttttggtattagtaatattttttattataaaagtgtcatttaataagattaagatttaaattttacctaataaatgtgtttattaataattcataaactagaagaatagtttaataaaaataaatttgacattttatatataatttcatatataactaatttatatataataaaagtgggtataatgtgaacatcggaaggcgaacgaagttcgcacgttaggtgagccaacatctgagcatgaaatgcgaattataaaactaactaattaaaattcactcaaaccaacctaataggacaacataaactaatttataatataaattttagtttcgaaatcaaatacatatataattaatttacatataataaaagtgggtaaaatggtgaacatcgggaggcgaaccatcatctgagcattaagtgcgaattataaaactaactaatcaaaagctatcaatctaacataaaatcaaaaatattaaaccaaaaaatatacataaatattaatttaaattcgaagaataaaaaaatttatttttaatacataatcaaattagccataatttaacttattcacataaaacaaaatatttaagttgaatttttaacaactgctatacaactatgcaaagattatagtgcacgaagcgttggcttgacatttacctaattgaatattagaataaaaacactaggattaaatccgtttttataagaaaataacctgcactggataacataaaattcgctgaaaagataattagtagaaaaattcggggagatattatagtgaaaaagaaaatgctggcagtaacattaattttatttataggactattattttcaggaacaatctattattttataaaaaatccagctttatactcactctcaataactttcggtactatcttttatcattttgctatgcgtctggcagtggggtacataataaataataggtttcacaatcatattgattacacgttaaagtggtttaaagaaagagattttgaacaaaaattttacatatggattcaaataaaaaaatggaaaaagtgggttcctgtttttaatccgaaagattacgatttaaaaaataattccatagcggaaattatacaggttacctgtcaggcggaagttgttcatgaaattatcatgatattgagttttgtgcctgttatattttcggtatggttcggagctgcagaggtgtttttaattacatcgtgcgtcgcatttcttatagacagcatttttgttgttctgcagaggtataaccggccaagattaatgagactgttaaaagataaacagttatcaaataatttataaaaatcattaaattttattttgaataatatcatcttaaatcaacaaaactataattgccgaactatcttttaaaatatgtgatggtaatcatttgaatatttgaaaaattttcgtttggaaaattgatgtttactattaagcaaggggatgatacaatgagcgaagaaagacaaatttataccgaatatcttataatcggcggcaatggatttgtggatggtatacgtgatgacgcacctgaggaagccaaacgtgagtttgaaaagtttctcagaaagcaaaaagaactgaaaaaggatgaacagtaataaaatggccggaaaataggttgataatgaaatgttttggtttgtacaaacggtgcaaatcggtttgattaataccaaattccggccttttacttaattatttttttaattgtgtcaccggcttttctgattgtaaactgcacggctaatccaataaatgctcctgttattattgctgcaattattagatacggcatataccagaaaattcccggggtttgtgtaattaaagcggcaacagcaacttgtgctgtattgtgaataattgctccgatgatacttgcagcccataagtttttaagaggaagatattttaaaagtatcatctctgttaaaaggcataagagaccgccggttaaactataggcaagcgtcataatctgaccgctgaaaacacttcccatagtgactcttaaaatcagtataataaatgcgtctgttgggcttaaaaatacaagtgcaaagagtgtaacaatattggcaagaccaagttttatgccgggtatggcaaccaacggcggaatttgagattcaagcacaaatatcgtcagggctattgctgtgagaatgccgatagatgtgattctgcggattgttttatgtccgatttgtttttcaggagactttttcatatcgtcctccactagtatgttattttccggttacagcgtctattacggaatcatcgttttcagtctttattttaacaactaatttatgaggcaggcagacaattggataaacgctgtttttaattttaccttgtttgacgcaaagcctgtccgggcagttagaatcggatatagaaatctcatctttttctatatgaacggtattaaaacctccggcgccgtcgtcaatgtttatatcatatggattatctacatcgtttaaatctattgtctcaataactttaccgttttgcacaatttcagctgtttttataggaacgttttgtttgcttgctataaagattataaaaactgatacaatcgctaaaacagcaaaaatgattatgaaaaatttgtttttcatttttatcacctaagattaaaattatttatatcatcttctatactatttctcggattaaaaaaactatttaatctctttcattattagcttaggttatattttttataagagaattttttctcatccatcagctgtttaattcacttgtaaaaatctgcagtttataaaatataaacttcggcagggcaggctaagactgcctcgagaggtgcgcagccgcggagcggcaaaggaacggcatgtcatattatctatctcgtattgccgatcttgtgagccgcataaaagcggacagacattgcttgctgtaaaacgtttgtgtgctcgctgtaaaatttttataaagttaatgatttatataacgcaaacttcggcaggacggtcttagaccgccgcgagaggtgcgcagtcacggagcatcaaaagaacagatttcatattatctcgtattgccgattttgtaagccgcataaaagagaattatcgttgttcactataaaatgtttatagcgttaattatttattatgtcttatgtattctatttgtttttggcgtatttgtcaagtttttgtctgtgctgtcgaaatcttttgttatatttctatttaaattgggtcttgtctaaaattgacgtaaatggtatactggtattcaattagaagtatgtaaagttttattgttgtcaaaaatcaagacatacttttgtgtgcctgttattttggagtgaaatttttttatgaattatactatgcttactgatttttatgaaatcacaatggcaaacggatatttggaatgcggtatggaggacaggatcgcatattttgatatgtatttccgccaggctcccgacggcgccggttttgcgataatggccggtgttaagcagctgattgattatctcagcagtcttgaattttcgaaggaagatattgagtttctgcgttctaaaaatatgttttgtgaaaagttcttagactatctttcggattttaaatttgaatgcgatgtctgggccataccggagggaactcctatttttccaaatgaacctatagtgacggtaagggggcctattatacaggcgcagtttgttgagacgatggtattgcttactataaaccatcaaagtttaatagcgacaaagagcaatcgtatagttcgcgcagcgaatggcattcctgtaatggaatttggctcgagacgggcacagggttatgacggcgctatatatggcgctagagctgcgtatattggcggagtggcaggaacagcctgcacaatttcagaccaaatgtttggcgtgcctgctttgggaacaatggctcacagttgggtgcaaagttttgatactgaatacgacgcttttaaggcgtatgcaaaatgttatcctgataactgtactttgcttgtggatacatacaatgttttaaagagcggtattcctaatgcaattcgtgtttttgatgaagttttgaaaccgatggggattaaaaaatgcggtataagaatagacagcggcgatataacttatctttcaaaaaaagctaggaagatgctggacgacgccggctggacagaggcgtctgtatgcgcttcaaattctttggacgagtatattatccgtgatattttgctccagggggctaagattgattcatttggtgttggcgagcggttaattacttcaaagtcggaacctgtgttcggcggtgtttataaacttgtagctgttgaacaccagggcgaaataattccgagaattaagataagcgagaatgttcagaagattactaatccgtattttaagaaggttgtaagactttattccaatgaaaccggaatggctatagccgatgtcttaaccacatacgatgaagtgattgacgacgcgctgccgtatgagatatttgacccgcaaaacacgtggaaaagaaaggttataactgactttaaggctgttgaactgcaagttccgatttttaaaagcggaaagttagtttataaatctcccagtcttgatgaaataaaggcatatgcagaagaggagctttctttgatttgggatgaagttaagcgttttgagaacccgcatacttactatgttgatttgtctcagaagctttgggatatcaggtatgatttgctgaaagcttacaatgcgtaaattggcttaatttcaggaaagctaaaattaatttgagagttattaattattaaattttataaaggaaaggtactttatgatgcagcaaaatccggtagaattttataacttaggaaagcttggaataattggtatgaaagggtgcgaagacatcgctaagaaaatagatatgcaccttaaaaagtttaatgagaacagcatgcctaatattgaaagttttcttattcctacaaattgtcccagatttggaacgggcgaggcgaaagcagttatatcgcattcggttagaacatatgatatttatattatagttgacccgtttaattatggagtgacttacaacatgtatggcgccgagcatccaatgagccctgatgaccattatcaggatttaaagagagttatatctgctcttggcggcaagccgaaacgtatcacagtcattatgcctatgatgtatgagggcagacagcatagaagaattgccagagagtctcttgactgtgctatgatgcttcaggagctttcaaatatgggggttgataatttcctgacgtttgacgcacatgattcgagagtacagaatgctataccgctgaaaagttttgagaatgttcgtcctacttatcagatgataaaagcctgcctcaagtataattcagacataatcctggatgcggaggatactctcatagtatctcctgatgaaggagcaatgggcagatgtatgtattattcttccgtgcttggtatggatttgggtatgttctataagagaagagactattcaaaaattataaatggaaaaaatccaatagtcgcacatgagtttttgggcaaggatataaccgataagaacgttatagttgtagatgatatgattgcttcaggagagtctatgatcgatgttgccagagaacttaaagctagaaatgccaagagagttatagtattttcatcttttggtctgtttaccgagggtgttgacaaatttaacaaggctcatgaaaatggtctgattgacgctgtgtttacaacaaatcttgtgtatagaagacccgagcttaaagactgtgattggtatcatgaagttgatatgtctaaattcattgctcttattatcaaacaaataaatgaggacaagtctataagcgagcttctgactcctatttgcagaataaataatattcttgagaaatataaaaatttaagaaatcaagattcacagaattaagtttatacttaaataagattatagaaagtgatataagatgactgataagactattaataaagcgggttctgtacgccgcgtcactgagacagagatggcggagcagagggattacatatccagaatacgcgcaatattagcacagagaaatgataaaccaaaagcttttgttgaaacttatggttgtcagcagaactcaagtgattctgagaaaatcaaaggtatgctctcggatatgggatataaaatcactgatgaaattgacggagcggatttgattctttataacacctgcgccgttagggagaatgctgaacttagagttttcggaaatttgggagctttaaagcataaaaaacgaaggaatccggatatgataataggagtatgtggctgtatgatgcagcaggagcatattgcaaatactataaagacaaaatataaacatgtcgatatggtttttggaactcacgctttatatcgttttccgcagatattagatgaagcattaaaacatacccgggtttttgatattgagaatgaagacggagcaatttttgaagaaataagcgttaaacgtgacgctccgccgcttgctaaagttccgataatgtatggctgcaataatttttgcagttattgcgtggttccttatgtgcgcggccgggaacgcagcagaagcgcagaggatattctcgcggagtgcagaagagtggctgacgagggttataaagaaataatgctgcttggtcaaaacgtcaattcttatggtaacgatttgccgggcggaactagtttcagcgagctgttaaagctggtatgccggacggagggaattgaaagaatacgttttatgactagtcatcccaaagacctttcggatgatttgatagaggttatggcaagcgagccgaagatttgcaatcagctgcaccttccgattcagtcaggttcaaacaaggtgttaaaagaaatgaaccggggatatacgcgtgagcagtatatggaaagactaaaaaaagttcgcagagctattccggatatagttttaacgaccgatattattgttgggtttccaaccgagacaaatgaagattttaatgaaacgctgagcgtactcaaagaagttgaatatgatatgattttttcattcatatattcaaagcgtgttggcactccggctgcaaaaatgccggatgctctgactgatgaggaaaagcacagaaattttgatgaaatgctgaaagtgcagaatgaaatctcaaaacggaaaaatgagaattattcaggaaccgttcagaaagttttggttgagggattaagcaagacgaatgataaaactctaacgggcagaactgagggcggtaaggttgtgaatttcaactgttctgataatagcgatttaagtttatccggctatgtgggtaaaatagttgatgtaaaaataacgtcagtgcagacgtggtctttattcggcgaaatagagaattagaaattatatggtaataccttaaaatcaaatgattttaggattatataaaaatcaaaggagaaaaaaatgaacaataatgatgcgatatttgaaaaggcaagagagttaggcgagcttataaaggcaagcgatgttagacaaaggtcagaggaagccagcaaggctttgctttctgatgaaactgcaaaagggcttatagattcatataataagctgagagaagataaaatggcggagtttactgaaaagcagcctacacaggaagaagctcaggaagtaaataacgtacttcaagcagagtttgagaaaatggctgaaaatgatataataaaagaatatcttgaagcggcaagaagttacgaaatggttttgggacaaatggacagcattttgaaacactttatagttggcgagcaagaaaaccaatgcggcgagggcggatgtgctacctgcggaggctgccactaaaatatggcttatccggttggtcggccggctggcggcgtgttttgcgtttgtcagccggtattgttatttatgactaaacttatgtttctatttccaggctgtgacttaatttttgttagatagcatatttgccttttaaatagagaatggcaaggttaatgttttctatcataagtatatatattttttgattcagtaatatttcggaagggagcggtatttttatatgataattgacagaaataatctgacgccgatgatgcagcagtattttgaggtaaaagaccaatataatgactgtatattgctttataggcttggtgatttttatgagatgttttttgacgacgctgtaattgcgtctaaagtattggaaatcgctctaaccggaagggcgtgcggtcttgaagaacgcgctccgatgtgcggagttccgtttcattctgttgacagctatattgttaagctggtaaatgctggtcacaatgtggcggtatgtgaacaggctgaagacccggccgaagcaaagggattggttaagcgtgaggttgttagagttatcaccccgggaactataatggatacctcggcgcttgacgaccaaaagaataattatctgtgttcattttttagaagcgatggcggtataggtctggcttttgtggatattacaacgggtgatgtttatgtcggtgaatattccggcaaaaacatgatgaaccttgtaatgaacgttataacaagatttgctcccacagaattcattatgaatatgcgcgcgtatgaaaatacggatttagtgaaaacattaactgataagttcagctgttttgtgagaaattattatgactggtcttttgctgaggaagagtctaaaaaagctgtcagcgaccagtttaatgccgtgcgcgaaggtgacggcgatatacttgaagagcttggaattaacgagatgagtatggctgtttcagcattgggcggaattttggcgtttctgaaagaaactcagaaggctgaacttaccaatattaaatctgttgaggttcttaatgatgacggcgagatgcagattgatatgtacagtatgagaaatcttgagataaccgaaactatcagagaacgttctcagagaggcagtctgcttaacgttctgaataagacaaagacgtcgatgggcggaagaatgttcagaaagatgataaccgctccattgacaaatagaatagccatacaaaacagactgattgcagtggacgagttttataaaaatcaattgtttagagaagagattatagatattctgaaaaatatttcggatatagagagaataatcacaaaattggcatataaaacagcgaattgtcaggatttaatttgtttaagaaattcttttaaaaggcttcctgaacttaaaaaatatcttgagcagagttctagcaaattggtgagggaacagctgaagagatttgacgatttgagcgatttatatgaattgatttataaaacgatagatgatgaagctccggcagtgctgaggaacggaaaacttataaaaaaaggagccgaccctgaactggacaaaattagggaaataaagcaaaacggtcaggattggcttacaggtattgttgaagaggagaaaagaaaaagcggaataaaaaatatgaagcttggttttaataaagtttttggctattatattgaagtcagcaagcagagcaacgaaaatattccggattactttatcagaaagcagactctggttaatgctgagagatacataactcctcaaattaaagagcttgaggaagaaattcttgaagccggcgagaaggtcaatgatttggagtataatattttttgcagaatacgcgaccatattgctgcgagttacggcaggatacgcgagacttcagacgttatagctctgatagatgttttgtgttctttggctgttgttgcggaatcaaacggttatgttatgccgactgtaaataattccgataaaataattataaaagacggacgtcatccggttgtggaatcgataagcaaggcgaacgtgtttattccaaacgatacaagtatggataatgagagtaatcagatatctataattacagggccgaacatggcgggtaagtctacatatatgcgccaggtggcagttatagttttaatggcgcaaatgggaagttttgttccggcttcatcagcagaaataggtattgtggatagaatatttacgagggtaggagcgagcgatgacctgagttcgggcgaaagcacgtttatggttgaaatgaaagaggttgcttatatactcaataacgccacaaaaagaagtcttataatccttgatgaaataggccgcggaacaagcacatatgacggtttgagcattgcctgggctgttgttgagcatatagccgacgcgaaaaagtgcggggctaaaacattgtttgccactcattatcatgaactgaccgagcttgaagacaaaataaacaatgttaaaaattattgtatagctgttaagaaaaagggagacgacataacgtttctcagaaaaatcatccgcggcggagcggatgagagctacggcgttgaagtagcggctcttgccggggtaaagaaatcggtaatcatccgcgcaaaagaaattgccggtatattagagagcagggagcagaaaactgtcaatacggccgatattaaaaccggaaccaaaaaagaaaagaaaactccgtttaaggatgaacagatagacttttttgcccaggctgataatcctgtaataactcagcttaaagagttggatcttaatacaatgacgcctgtagaggctttgactaaactttttgacctccaggcaaaagctaaaaatatgtgatttaaagccgctgtgcgctgtgtgcggcggcttttggtatacgctgtaaaaagttgacatcattaaattttgatgatatacttcaaaataattagagttttgggaagtgtttatatggaagaaaaaatacatgttttatctcctgatgtggcggataagattgcggcaggagaggtggcggagagacccagctcggttgttaaagagctggttgaaaatgctgttgacgcaggagcggataaaataacagttgaaataaaaaacggcggtataaaattaataagggttgcagataacggtaagggaattccgtcagaacaggttcctacagccttcctgcgccatgctacaagcaaattaaacactgccgatgacttatataatatctctacaatgggatttaggggcgaagcgctttcgagtatctgcgctgttgccaaagttgagattatcactaaaactgctgaagctgaagcaggggttcattatattgttgaccacggtatttgcggagaagctgatgaaatcgcttgtgcggacggaactattatgatagtcgaagatttgtttgctaatgttcctgcaagaatgaagtttttgaaaaaagacagtacagaggcaggatatatatctgaccttatgacgcggctggctttgtcaaaaccgaatatttcatttgattatatatgtgacgggaagcctgtgtttaagacgtcgggagacggggatttgactaatgttattttaaaggtatatgggcttaagtttgcaaaggctgttatgccggttgattattttgaagacggagttaaaatatcaggagttatcggtaaaccggaactgtcctttggtaatcgtaccaaacagacgatttttgttaatggcagatatataaaaaatcatgtaatagccaaagttgcggaagaggcgttcagaaacgctgtaatgataggaaagtttccgttttttgtattaaatatagaggttccgcctgaaatggtagacgtcaatgtgcacccggctaaaactgaggtcaagtttgcaaatgaaaaacagctgtatgatatagtgtatcatgcggttaaaaactcaatgtatggaataaaggtgagtgaagaaaaagctgaccagagcgctataactatacaaacaaataaaactttttcaaaaagcaaagaagcgcctaagctgaaagattcagcggtcttaaatgaaaaggtaatacatgattatcttgagtataccaaacctgttataaataaatctgaaattttagataatactcctttagaaaaaacgcctgatgaaaatatggatgaaaatgctgctgaaagttccgataatggcggagttttagacaaagttgtggatataatagataattttttggaacctgacaaagaagaagtatctgataatatctcaaatgatgtaaatgaagcaactccccaaactaaaaaagagtttaagcaaaccgagttcggagatgttgataagatatttgataattcagacagtatttttaaagattataaaataataggacaagtttttgacacttatgttctgctgtcagcggcggacagattttatatgatagaccagcatgccgctcacgaaagagacggttttgaaaagctgaaaaaagcgtattttaataatgaacggctgtctcaggttttaatgtcgcctattgttataaatttaagccatgttgagtatgacgcggttatgtccaatcttgatgagtttgaacggtttggttttgatgtcggcgagtttggctttaatacggttgtggtaaacgagacgcctataatagccggcgacgagcagataaaggatttgtttttggaaataacagacgcgcttgtggataatatcaaacatccgatagcggattttgaagaaaaagcgcttgatatgatttcatgcaaaaaagctattaagggaaatgataagctgtcgctgccggaaatgaccgaggttataaaaatagttgaaaatttgtattctaaaggtataaaaacctgtcctcacggaagaccaatcatggttgagtttacaaaaaaagagatagagaagatgtttaagcgtatcgtataaaatgatacaaggattatatgaggtggcgtagatgaataaacctaaaatattgtgcgttgtaggccctaccgcttcaggaaagacagactatgctgttgagcttgctttaaaatgtggtggagaagtggtttcgtgtgattctatgcagatatataagcacatggatattggaaccgcaaagccgactgctgatgagatgaaaggcgtcaagcatcacatgatagatataatcgagccaaacgagagttttagtgtagcgcgtttttctgagatggcaagggaatgtatagacgatatacttttaagaggaaagacgcctgttttatgtggcggcacaggactatattttgacagcacaataaataatataaattttatacaaatggacacagatgaagagtatagaaaagatttggaatcggcggcaaaggtatttggaaatgaatacgtatataaaattttaaaaagggttgacgaagaatctgccgaatccattcatcctaacaatctaaaacgtgtgattagagcgttggagatatataagactaccggtaagaaaaaatcggaactggataaggaacagctgtcagaaccattgtatgagcctgaaatcacagggcttatgcgtgacagggaagtcctctatgacagaataaataaacgcgttgatataatgatggaaaagggacttgtagatgaggtttcagaccttattaaaattggtatagatacagacgctacatctatgcaggctattggatataaggagataatagaatatttggacggaaagacaagtctcagcgacgctgttgataaaataaaaagagaaagccgaagatatgccaaacgtcagctgacatggtttaaacggaacaaaaaaattcattggataaatatttaaatataaaattaatgcggcgtatgaactctaagtttgtatgccgcattttattttttggaataattttacagacagcgacattcttctgttacaattaagttacatttgttctacaactcgtggattgcggtttacatactttttgacagagattataatagttattatgtagaatggatgtgtatgtttagcgctataagagatggactgttgattggaggtagtcttgtggcaaacactactgacaattcaaatataagattacagaaaagacgcaaaagagatataaaaaagaggctttttttaattcccaaattgatttttgtgtttttggtggtctttttgcttatcagtatatttttcagatcaggtaatagtgtaagcacttatactgctctgaatggtaaaattgaagaatatgtcctggctgacggttacattttccgtgaccaggagctcatatcatcaccgtcagacggttattttgagtgcctggcagatgagggagaaagggttaatgatggaagcacaattgccgccgtgtataaaagtgctgtagaccctgctgttactgaagaaatatcacagcttaaaacgaaaatttccgatttggaaaatgatgagaccgctgcggatatctattctgcgaacgctgtgaaaatagagcttaatatttctgaggaagctcagaaacttacgcaggttagggataataataatttctctgatattgtgagtataaagcacagcgttgatgattatattgcaaacaaacaatatgcggttgaaggcggcaaaacaaaagaggacaggctttcggaaatgaaagcaagacttgatgaattggaatcaagcatagacggggaacgcgagtatatatatgctccgagagccggaatattttcgtcaaagattgacggatatgaagacgttttaggcattgagatgatgggagacgccacgccgagatatataaatggtatttctaaaaataatgtgacggttggaaccacagtcacaaacggcgaaaacgtctgtaagataattgataattacgagtggtattttgtcggtttaatttccgaaaaggaagctgaaaattttaaggttgaccaatctatcagcataaaattttatgatttatccgatagtatggtatccggaactgttaaggctatctctaagcctgaggacggcaaggttgctataaccgtctattccacaagatatattgactctatttatacgaccagcaaagtatccgcagaactgctcactgagagttcggaagggataaaagttccatcgtcttctttgagagttatagacggacagcagggagtttatgtcgttcgtttgggagtggccagatttgttccggtcgaacttctttacaataataaagaatgggctataataaaacctgttattagcacaagttatgaggaacatcttgaagtttatgatgagataatcattaataccaaaggtattgaggatggtaaggttgtgagacaatgagtgaagttcctgatatcaaaaaaaattatatagatgttttggactcggttaataaaattactgaggaatgcggcagaaagccggacagtgttcgtctgattgctgtctctaagacaaagccggcggaatatataaaagaggcgatggaggcaggggccgtagattttggtgaaaacaagccccaggagcttgccgctaaatatgagcaggtgagcggagtgagatggcaccaaatagggcatcttcagaagaataaggttcgccatataataggcaagaccgctttgatacattctttagacagtattgagcttgcaaaagaaattgataagcgcgctaaggctgttggaatagttcaggacgttttgattcaagtaaatatttcaggcgaggaaagcaaattcgggataaaacccgagaatttgccggagatgctggaaagtttaaaagagttcagcaatgtgaatacgacagggcttatgacaatatccgttagaggctattctcaggatgaaaacagaaagttgttctcaaaactcaaagagttgggcagcaaatatggtcttagagagttttcaatgggtatgagccatgattataaagaagccatagagagcggggcaacaatggtaagagttggaacctcaatttttggcgaacgggattattccctaaaataatatgtgaaatatgaaatctattatatacaaaatactgataaacttaggaggaagaaaaagatgggaagctttatggataaagtgtacagcatgatgggtgttgacgttggagatacatatgaagaggaatactatgacgattatgcacagggcggatacgatgaaccggatccaaacgagagttatatgcccagcagaagaaattcaggaagaaacgcaggcagagtaaatagatacgaggacaaccctcagatgaaacttgttatcatgcagcctgtaagctttgaagaggcaagggatatagcaaaccatttaaaagagagaaagccgatagtaataaatcttgaagctgtagataatcctacatccagaagaatagttgactttttgagcggttctgtttatgctttggacggaagtattaaaaaagtatcaaacggtatttttctgattgctccatgcaacgtcggcgttatggatgaggaagaagcatacgaagaacgctggagctaaaagtggatacagatgataaactgatagtctctaaggcttttgataccgttagtatcgctgagagacagtatatttgcaaaactatggggtttttaaatccccatcaagcggctgtagtccgcagggaaatttcgagaaaaataccgtcggatattggcgttgaattttatggcggatataaagacgcggagagatgtttgtttatatgctttccggaatatttggaaccggactatgacagtattatctcagtgctggagataacagcccgtgacattgataaaatgtctcatcgtgactatcttggcagtcttatgggtcttggaattaagcgtgagaatattggtgatattcttcctcttgaagacaggtgttatatttttaccaagtctgatatatcaggatatataattgacagccttttaaagataggccgccatggagtgaaaatttgcaaaagaagtctttctgagataacggtgcctgagaaaaagaccgagcaggtcagaactactgtttccagtctaaggctggattgtatcttatcaggagcgcttaatatgtcgagaggcagagctgctgaactaataagagcggagaaggttcaggtcaattttgaaactgcggacagtatatcaaagatattaagtcctgacgacttagtttcggtcagaaattttggcaggtttaaagtggccgaaataggggggctcacaagaaaagggagatacggtatcataattgagaagtttatttagtatatatagtagagtatagatttcgtgagaattgttaaacggtcaattgattaaagttagaagattgggaggatggaatatgcttacacctgctgatatcgaaaataaagagtttaaaaaagagatgcgcggttataacataaccgaggtaaatattttcctgaaagaagttgcaatgagctatgaaaagatatatcaggaaaatctttcggctatggataggataggtatgctgtcagacgctgtaaaacaatacaagtcgatggaggataccctcaaaaacgcattgtctgttgctaagggcgcaggggacgagataaagaacagcgcccatgggcaggcgcaaatgattattaaggacgcggaaaacaaagcgggtaaaataatcaatgaggctgcaaaggaagtcgctgatataaattataagtatgaggaaatgaagagaagcgttgaggtgtttaaagcaaaagtagtatctcttttgaattcccagcttgagattattaaggaatattcaaatataaatgccgacactgacagagaaataaggtcaagcgccgaagcggttgaagtgattaaaagcgaaataaacgatatccctgatttgccgggggatttaagtagagacgctgaatcaaatctgatgtctcagctcgaaaaagttactcaggaactccctaggataaaactgaatgaagacggcgaatatgttcctgcagatgagaattaataaataaaattttaatatttaaggttagggctgttctgcgtaatgcggaacagtccttgacatagaatgctgaaatttggtttgaaaggctgatgttatgataatatattttataataggtatactggttttaattcttgacatagttactaaacactgggcttcagcggctctgatgggaacatcggggataccggttatagacggattttttcatttgacttatgttgaaaattccggagtggcttttggaatgctccaggataaaagaataatttttgtcacaatgtcgctgttgatactttttgtattggcaatgtatttttataaggcaaagaagagggatgtttggcttaaactgggaacggcgcttatctttgccggttctatcggcaatttgattgagcgtgtgacaaatgggtttgtagttgattttttggacttcagagtaataaattttccggtgtttaacattgctgatatggcggtgtgtatcggcgcggcggctttggtgatacactttttgacctctgatacagagagtaaagataaactaaatgagaagaaagaataaaatacggtgagaatatggagaacgatgagataaagttgttggaggtatccgaggaggagggaaggctcgataaatatctttccgataagcttgagaatatgactcgctcatatttgaaaaagcttatttctgatgataaagcggtattggtaaacggcaatccggcaaaaccgaactataagcttaaacccggggatataatagaactggcagtgccggaacctatagaactggaaattaaggctgaaaatattcctcttgatatagtatacgaagataatgatatgctggtagttaataagccgcagggtatggtagttcatccggcggccggaaactataccggaactcttgttaatgcgcttctttatcactgcggagattcactttcgggaataaatggtgaaaaacgtcctggaatagtgcataggattgataaagatacaagcggactgctgcttgttgccaaaaatgataacgcgcatcaaaaactgtcgtcacagataaaagagcacagtcttacaagagcgtataaagcgctggtgcatggaaatataaaacaggattccggtcgcatagacgcgcctatcggccggcatcccagcgatagaaaaaagatgactataacggacaaaaattcaagagaggcagtaactaatttcagggtgattgaacgttacggccgctatacttttgtcgagtgtattttggaaactggcaggacgcatcagataagggttcatatgtctaagaacgggcatcctattgttggagataagacttatggagtgaaaaaggaagagtttaatttggcgggacagttgctccatgcgtataaggttgggtttatacacccggtatcaggagaatatatggagtttgtgtcagaattgccggattactatatgaacgtgcttgatagattgagaaattttatttaaaagctgtaaaaatttgtagacaaagtgagtttgttaggatataatagtagcaagggtgtctgggctcagagcgtagatggtcttgctattttgtctgtaaggtgggattaatatgagaacagtaattcttgaaaaagaagagattgacaaaaaacttaaaagaatggccagccaaattgttgaacgaaacgtaggtgaaaaaagcatctgtctgattggtatagtcaggcgaggtgttaacgttgccgaaagtttggcagaacacatcatagcaagcggtgaaatgaacgttgaagttggaagccttgatataactctatatggggcggaccataatcttatagccaaataccctgtattaaacgatacggatatacggttttctatagataataaaattgtagttttggtagatgatattttatataccggaaagacaattcatacggctattgacgctcttttggatattggctctccatcagaagttcagctagcctgctttgtggataggggaagaagaactttccctataagcgcggattatgttggagttagagttccgagttcaggtcttgagcgtgtggttctgcatgttgaggaagtagacggcgaaagctgcgtaatgatagagaagcgtgatagttcagcagcgtttaaaatataaaagaataggcaaagatgaaatagagggttagtccctttatgtaatatacagcggaccaaaattccgcgtaaatctaatattataaatagaggaattacgatgattgataacttattaggtttaaaagaaacatcaagagatgatattacagcaatattggatgatgctgtgaaattaaaaaacgacgttctaaagcaggacattaaaaaatcaaatatcctttctggaaagagtataataactctgttttttgaaaacagcaccagaacaagggtctcttttgagttagcttctaaatatcttggagctactgccgcaaatatttcagcgggaggaagcagtattgccaagggcgaaactttgatagatactgcaaaaactttggaggccatgggtactgatgtcataattataagacacagcatgtcaggttcacctcatcttatttccaagtacataggctctaaggttattaatgctggtgacggaatgaatgagcacccaacgcaggcactgcttgatattatgactatcagagagaagaagggaaaagttaaagggctcaaggttgctatagtcggagacgttaaacacagccgcgttgccaggagtaatatttacggtttgaataagctgggagccgaagttgttttagccggaccgtctactttgcttccttccaatttggaagatatgggcgttaaggtatacaccgatgttgaaaaagccgttgagggcgctgatgttgtaatgggtctgcgtatccagcttgaaaggcagaagaagggactgtttccatcaatcagagaatacaataagtattttggaatagatgagaggcggctctcattggcaaaacctgacgctatattgatgcatccgggccctgtgaaccgtggcgttgaactgaacccgcaggttgctgacggaagtcagagcgttattaatcagcaggtcaccaatggtgtttgtgttcgtatggctgttttaaatatgctggcaaacggtaaaagatatgataatttagtataaataatcttatattaggttgataaggcaaagtgttataattgtacaagtaaggggaaatgcagattgaaatcaaattggattttaataaaaaacggtcatgttgttgacccggcaaataatatagatgaaaagcttgatattttaatcaaggacggaataatttcggaagtaggcaaggatatacaaacaaatccttttgtgacagtgattgacgcagaaggtaagattgttgctccggggcttatagaccttcatgttcatttcagagaaccgggatatgagtataaagaggatattgaaagcggaagcgccgctgccgcaagaggcggagttacgactgttgtgtgtatgccgaatacgaacccaactattgataatccggctcttgttaaatatgtgaccgataggggaaaagaggtcggactgacgcatgttctgactaccggatgtataaccaaaggacagaaaagcgaagagcttgcggaaattggagagcttaaaaacgccggagctgttgctgtttcggatgacggcagacctgtgctttctccatcgcttatgagaaaagcgctggagtataccaaaatgtttgatattcctataatgtctcacagtgaagatttggatttggttgacggcggaagtatgaatgaaggatacatgtcaacttatttagggcttagaggaataccgaaatgcgctgaaagcgttgctatttccagagatgtgctgatagcggaggacgtgggaggaagactgcatgtctgccatgtgagcacacgcaattctatagacgctatacgtcaggcaaaaaaacgcggtgcaaatataacttgtgaaactgctccgcactatttttctttgactgataaagcggttgatggttttaatacaaatgctaagatgaatcctccgctaagagagcaggacgatgtcgacgcggtaatcgagggcttgattgacggcacaatagatgcgatagcgactgaccatgcgccgcatgataaggatgaaaaggaaatagaattcgcattggcaatgaacggtattgtcggtcttgaaacttctttggggctgggtgttacaaaccttgtcaagacaggaaaattaacaatgacgcagctgatagaaaagatgtcggtcaacccggcgaaaattataaatatcgacaagggctctttatctgttggaaaagcggctgatattgtggtttttgacgctgataatgaatatactgttgatataaatgaatttgcttcaaaaaataataattgtccttatgatggaatgaaactgtatggacgggttgattttaccatattggatggaaatgttgtgtttgaaagatagagaggagttttttatatgatagactcattaatcgaaaagatacaggagaagaaaaatccgactgttgccggccttgacccaaaactggattatcttcctgaagaaatggtaaagaaagcgtttgatgaatatggagaaacttttaaaggagccgctgaggcaatttttgagtttaacaagacgctgattgacgctttatatgatatagttccggcagtgaaacctcaatcggcttattatgaaatgtatggtatagatggtattgagtgcttgaaaaaaactattaattacgcaaaagaaaagggcttgtatgttatcttggacgcaaaacgcggagatatcggtgcaaccagtgaagcatacgcaaaagcttatttgggaaaaaccgatataggcgaaaaacaggagcctgcttttgacgctgacagtttaacagttaacccatatttaggaacagacggcgttcagccgtttgtagaacagtgtttgaaatttggaaagagtatttttgcacttgtaaaaacgtccaataagtcttccggtgagattcaggacttaatcagcggcggcaagccgatatatgaacatatggctgagctcgttaaaggctggggtatggataatttcggaaagtatggttatacgcaggttggagctgttgttggagctacttatcctgagcaggcagaagttttgagaagggttatgcctcatacttatttcttggttccggggtatggagctcagggcggtaaggcggaagatgttgcaaagagctttaacggagacggacttggggcaatagtaaacgcttcacgttctataatgtgcgcatataagaaaaacggcggcgaggtcggtcaggcggcgagggatgaagctataagaatgcgtgacgatataatgtcagccgttggagctgtttgattaactatagaggattggagaggttaagatgctgtgtgaacttgtagcaaaaggtcagataagacgcggtctttttgactatattgtagactgtccggatatggcgatgaaggcaaagcccgggcagtttctccatgttttatgcggtggggatacatatttaagacgtcctataagtatctgtgatgtggtcgaaaacagacttataagatttatctttgaagttcgtggaaagggaacaaaagaactggcaagagctaaagaaggagacagactggatattttaggtcctttgggaaatagttttgatatatctttttcagatgaaactggtgaaagcagttcgtctgttcccgagggagatatagttttaatcggaggaggaattggtatatttcctcttttatatctttcaaaaagtcttcccaaaaaacctaaaatattattgggattcagagatgcagaaagtatggcgctagtcagagagttttctaaaagctgtgaggatgtttttatagcaagcgacgatggcagcgtggggcataaaggctttgtaactgacttgcttaaaaactctatagaatcgggaaataaaatagaaagaatatatacttgcggcccaaaacctatgatgaagattgtggcggaaaccgcagtcagcaatggaataaactgtcaggtatctatggaagagagaatgggctgcggagttggggcctgtgttacttgcacatgtactttaaaagatggttcaagaaaaagagtttgcaaagacggacctatatttaacgcatcggaggtggatttcgatggctgatttgagcgttaatatagcaggagtagagtggaaaaacccggttacaacagggtcgggcacttttggattcggaagagaatatgcggaatattttgacctttcgaatataggcgcgatttgtcttaaagctatatccgccaaacccagactcggcaataagtcgccgagaatcgccgaagtaaccaaaggtatgctgaacagtgttgggcttcaaaatccgggagctgaatattttcttgaaaatgaactgccttggctaagacaatttgatacaaaactaatagctaatctgtgcggttcaactattgaagattatgtagaagtcgcagaaattttaggtaataagcttgatatgtttgaacttaatatttcatgtccgaacgttaaagagggcggaatggcttttggaactgacgcgaagatgatagaagaaattacatcaaaagttaaagctgtatcgaaagtgccgcttatagtaaaattgtcacctaatgttacagatattgctgagatggcaaaagctgccgaagcaggcggcgctgacgcaatttcattgattaatacattgctgggtatgaaaattgatataaataccaggagacctgtcctgaataataatatgggcggaatgtccggacctgcggttatgcctgttgcggtcagaatggtgtatcaggtgcgccgggctgtaaagcttccgataatcggtatgggcggaatcactacaggagaggacgctgtggaatttttgcttgcaggggctgacgcggtttcagtaggaacagccggtattgttgacccatatgcctggataaaagtgagaaatgaaataaatgactatcttgataaaaacggatatgaatctgtaaatgatatagtaggaaagcttgaaatgaataattaataattggaggtttgacaaatgacaaatgaacaaataattgatatgcttaaagaggcggaagttttgctggaaggacattttcttttaacatcgggaaggcacagcgataaatatatgcagtgcgctaagattttccaatatgcaaagtatagcgaacctctctgtgccgagcttgcaaaacaatataaagaagataatgttgaattggttatagggccggcaataggcgcaattcaaatggcgtatgaagttggaaaacagcttggtgttaaaaacatatttgctgaacgtgaggatggaaaaatgacgctgagacgcggatttacaatcgaaaaaggtcagcgtgttctaatcgtagaggatgttgttacaaccggaggaagtgttcgagaggttatggagcttgtcaatgaagccggaggaaagatagtgggaataggttcaatcgttgacagaaccggcggtaaaattgattttggagttccttataagagtgcgttttctatggatataacatcttatgagcctgatgactgtccgatttgtaagtctggaacaccattggttaaaccgggcagcagaaagataaaataatgaaatcgaataatacacatgacggtcacagaatcagaatgcgtgaaaagcttgagagtggaaatttagctgatttacctgaacatgagcagcttgaaattcttttattttcagtgataccgagaggaaatacaaatgaaatagctcatgagcttctgaaaaaattcggttcaatttatggtgtattgtcagcagatatcagcagtttgctggaggttgacggcataggagcgcgcgttgcggattttctgcataatcttccggctgttttaggagttgttatgcgttctaaaatctcgtatgaaacagataataaatttttactgaatgatattaacactttaaaagattatttgttttctctattttcggatactgtttcagagcgggcgtatatattatttttaaataagggttttcggcttatcaagtttgagaagataagcgacggctctttagagcaggtatacatagatatatcaaaggctgtacggcgcgccatattaaacaatgccgcatatgtggtgctgacgcataatcatcccagcggctcggttatgccaagcgacgctgatatttcatcaacccgagagcttgacgaggccttgaacactgtaggaataggtcttttagaccatataataatcggcggtgacagctattatagtttccgtgaaagcagacattattaataaaagaatcctttaacctgatgaatttggcgggttagaggattctttattttaaaatataaaaccaaatttattataaaaaacggtgaaagtgcttgtataatatcatataatgtcgtataattactataaagatatgtgaatttaaagaacatattaaaaagaacatatttgttgggaggaattatagtatgcaagatatgcagaaaatatataaactaaaaatagataatatattttcaaatagtaatgatattatacatgaaatggattgccgatttataaaacagttggcatatggtaaaaaaatatgaattcaaaaagttcacatcatggtcatagagatagaatgcgggagaaattggagcatggaagtttggcagattttcctgaacatgagcagctggaagttctcttattctctgtgataccaagaggaaatacaaatgaaatagctcatgaacttttaagaagatttggttctatatatggagttttatccgccgacaccaatagccttatccaggtggaaggggtaggtgaacgagttgcagactttttacataatttacctgctgttttgggtgtggtaatgcgttctaaggttttgtatgaaacggataacaggtttgtgcttaaagatacggacagattaaaggaatatttgttttcattatatgcggacactatagctgaacgcgcttatatcttatttttgaataaaggatttcgattaataaaatatgaattgatatgtgagggttcaatagatgaggtttatttagatattaaaatggcggttcgcagagctttaatgaaccatgcggcatatgtagtgcttacacataatcatccaagcggtcttgtttttccaagcgattcagatattatatctaccagagaactgagcgaagctttaaatacagttaaaattgggttttgggatcatgtaatagttggaggtaatcaatactacagttttagggagagcaggaattattaagagaaaatctgggaggaagacatgccaaaatcagcaaatcaaaagttaagattattatttgaaagagaaattttactaagagaaacggatgaggagaatcctattactacaaaacagcttatatcacgtttggaggattgcggcgttcaggctgaaagaaaaactatttatagtgatattgagtctctttccctatatggtatggatataattaaggttagcggaaaaaatggcggatattatgtaggtgagcgagactttgaacttcctgaattgaaactgctggttgacgctgtccaaacgtccaaatttataaccaaaaagaaatctgctgagcttataggaaaaattgaaaggttaaccagcaagtatcaagctcaggtattgcatcgtcaggtatatgtatctgcccgtattaaaaatatgaacgagagtatatattataatgtcgacaaaatatatcaaggtatagatgaaaacaaacagatagaatttttctatatggaatataatcttgataaaaagcgtgttcctagaagaaatggaaaacgatataagataagtccttatgctttgacatggaacgatgataattattaccttataggctatgacggacagtccgatacaataaagcattatagagttgataaaatggagaatatagttgttctcaaagaaaatcgcgaaggagaaacaaatattgatataggagaatattctaaaaaggtattttcaatgtttggcggtagtgaggagtccgttactcttaattttgacaataggtttattggagttgtaattgacaggtttggtaccgatgttccggtaataaagactgacagtgaacattttgagaccagtgtaacggttaagataagtcctcagttttttggctggttggcgtcattagggagaggcgttaaaattatctcgcctatcagtgtgaaagatagatataaagagcatatacagtcgattttagaatgagaaagataatttaaacttttttaatagttttatattttatttggttgagataattggatagtaatcatattattaaactgtaattgataataaagttctattgaatttatataagaaatttatgtgaataaaaatataagtgctgcaaaatatataagttaaaacacagctgctatttattatataagcagctgtgttttaattggtatgcccgacgggattcgaacccgtgaccttcagagtcggagtctgacactctatccagctgagctacggacacataactttttttattataacataatttagctttatattcaataccttattctaatatttcatgatacgctttgtaggtttgtcaatgatgtgttacaaaaaagattaaaagagttcgccgaaattgataaaagagttgatgtagtcaattggagctttccaattaagcggacgcatcgggaatttattgtagttacggttatgcacctttaattgctttgcaaaatcatcaaacgagtagaatttatgtgttgcataaaaatactcgttatccttacggtgtgaacgctagcttcaccgacaatgcaagcttcaggaacaaacttaacgtctatctgtactctcctaaccgggatagagcatttgctcgtaaggttctggtatgtatttgggattgggtggtttaacaggcatttgtccctgtttgcggagtatgcggtaaagacctgtaatagaacgagtatagcctctttgacgaagcttaacccaaaacacaacaagtccagcattgggattacggcgacgcatatcagtaatcaatttcaactcatcagcggtatgctgattgggatgatggtgaggtttatgtgatttatcggctaaggaggcgagcgtaccgtcgtagcgttttcgccagcgatagacatactgacgatttaccttatagcgaatggcagcctttgtcacgccgtgtttaaaagaatattcaattaatacttgcctaaatttcatagtttgtgttatagtgttcaaatacggaaggctcatttgtgcgtgtgatattgtggtaatataactataacacaatttatgagttttccgtattctttttttctctttgtacacatctattgtaatcttacaatataaatgagaaaaatataaaaaagatattgacaaattattaagaatagtataaaatgaaatagttgttgatttcaacgacgtttactatttgcggctatggcggaattggcagacgcgcatggttcaggtccatgtgaaagcaatttcatggaggttcaagtcctcttagccgcaccaaaagcaatagaaccagcgtttttacgctggttctatttttatttacacgatttttacacgattttgtttaaaatattaatcgctcgttcttcttctcgcggatataaatggctgtaagtattccaagttatctcaattttagagtggcctagtcttctagctatttcctgtatattaataccttcattggctaataatgatgcgtgcgaatgtctaaaatcatgtatcctaatttttttaatacctgctagttcagcatattttttgttatgtttgtcaagagtactgtctcggagagaagtcatacctccgcaaattctataatcgttattgaaaccctcaagttgtttatatctttccttgtgagcctttaatatttcttttaatggtgtggggatttgtatagtgcgtatagacgatttgttttttggaggggtttctctgtcatcgccctttaatttctgcgctatgcttcttgtaacgtgtaaatagtccccttcaatgtcagaccacttaagagcatgaatttcgccctttctgagccctgtatagtaagcaatgttaaagaatacataataatcccattcgtggtttgtggaactgttttttgcacagtcatatgttgcctttatatataacttgaattcgtcgggtgtataataatccatttctttttcggattcaagtgtaattgaacttttaaaattacctattttttttaatggattcttatctatgtagtccatttgaacagcgtaattaagcatagttatgaattccttataaatatgctgttttgttttaatacttagttttttaacccccttatttttgacggttttttcgtttatgacgtccttccatttttttagtgtcggggttgttaatttatctagacgtaaatttcctaattcgggaataacatgattatctaaatacgtgactattgatctgatagattgttctcttagttcatgttttttagattttaaatattcttcatataattgttttacagtaatgcgctttgctggaatagattgttttatattataatttaattggcgttcaagctcttttgcttcaacgttgccataagtgacacggtcaatttgacgatttattcccatgctgtcctgataattaatacgcaccctatatttttgttttccgtctttcgaccctttcattttgtatattggcacaaaataacactcccttgtatttgtttcaatccacacacccgtatagggtgcgacgcaaaaatatataagagttatacacttttattcttataattgttatattgtgacataatatttaaatctttaatataaaatgtgtttataaaaatacctcttatcatatatttttgtaaaattttggtgcgaacctcccggggaaatcatgtaagctttatattcgcaccactatattttaatagttatcaggtttgcaatcttcgcaaggctcatagccagcttgtatggcttcattgattgtcatatgtattaggttagatttgtcctttatatgtttacagtttgacgtgtgaaacttttgacctgattttgtaactactacgtcaatgtccattatttgaggttcagatgtcggcgttgcttcttgtattacttgtgtttgttctatattaggttgattattttttcggtctgttgtcattgtagctgttattaatattaacgctgttattattgccatggcaacatatctaatttttatatttttctctttttttgtactaaattgattacagagttttaattcatactctgtatattttttgtgcttacgcacttcatcagccactaagttgcttcgtttgtcgtctagcaatgttgtttctgatataagctgtggtgtacttatatgatttttgcataaaatacagacaggagcaagaaattcaagtgcaaattcgtttgcttcgtcttcctgaccttcgttaattagtcctcctggtttgtatcctaatacactactatcagacatatgccctaacactatatgacccagttcatgcgctagcaacatgcgtttatcgttagatgataagccggatcggacgaatacgattttttctgtttcatgtttatacgtaaatgcttttgtccgttttgcaatggataatacatcatattgcttaagtaacttaatatggttttctgagttaagattataccctataatagaccagccattttttttaataatattttcgatgtgtgttagacttattggcaatttatttacagcattttctagcaaagtagttactgctttgtatcttgcaaccattataatacctccctgaaattcatttcatataggtatcataataccatataatgtatatttcaagaggtaataactgttaattaatcttttttgtcgtattttgtcgctgattcgccgtaggcagctacgtcaaaagtttggctattagcttgcctaaattgttcagcaatagataatgtctttttcggtatactgtttaatttatatttagaattctcagctaaatcatttatatagtctattactttttgtttgcctgtgctatttagcttccttaaggtattgattaattgtttttcatctttacttaacggcacttctttttgtgcaccatattgcattgattgatgtgcttttttagtttctgctaccttatcagagccttcgtattttgtagggtcattagtccatccaagcaaatactcaggtgtgcaatgcaaagctgtcgcaattgcttttattctatttataggtattttttctgtttctcccgttgcataacgttgcaatgcggattttggtatatttgtcttataagataactcactataagatattttattattttgaatagctcctaatattcgtcgtgcgcactcattcattttaatcacctcaaaataataataacatatgcgtcccaaaaaagcaatataaaaatcaagatataataaattttgtcccaaaacagggttgacaagtgcaaaaatatgtgttattataatggtgtcccaaaacagggatgaaagggtgataattaatggataaaaatagactacttagttacattgtgaagaaaggatataatcaaagaaccttagcaaaggcgctaggagtatcaaaaaatacattaaattcaaagattaacggaaagtcttattttgatactcgcatgatatctgatatgtgtgaattacttgatattacagatgatagtgaaaagattaaaatttttttggcccctgcgtcccagaacagggataaaaaaacacatcagaacacaagtaatgttaattaaggaggtgaggaaaatgacgctcaatttaaagtttagagttttaaccgattggaacgacacgttgaaaacaattcttgatttagttgaaaaaataaaagaacgtcaccccaacgaccaactatttattgaagtgacgttcgaaaattaagcttttactatttcaatacatctaataccttttgaagaaatagtgatacatgatgtgtcagaatataatacataattaaattaaggaggtgaggaaaatgacagaaaaagaattgagtaaaattgaggaacttgcaaaaccgttggtcgaatttgtaagagaaacaaaaaaaccatatgtggagattcaaatcagcgctgaatctgtaaaaataaaaacagttacaggttacattccaataaaaagtgacgaacataattaaatattcgtcacttaaaggctaaactcttgtatatctgtgcgttttttctaagatatataatgatcttcctagtgagcccgaatttatgaatacacggtactcagtttcggaaacattgtagtattggtagacagcaccatcttgaaattgaacttccagtgtgccgttttcccaaccaacgcttgagattcggctagacacaacagggtttcgcagcatgattttcaccacctttcataaaattatttatagcagaggtgctctaaatgaaagtaaagtataagctcaaacaatatatgctagaaaataacataactatttattacttatctaaatcaacaggtatttcatatgagttattacgacgggtgtttaacggaaatagaacattgccgtccgatgaacttataaagatagccattgcgttagattatgatttaaatttactaaaatagaacatcttgtatttcgattataattatacaacgatatatagggtatgtcaagcgatatataactaatctacttaagttttatatcaaattgattacaacactacggattagttggaagctgatttgttagattaaggaggtaaagaaagtgggagcaagagtaagaattgtaagcatagatacggcgttaaagatttattacgcatatcctgaaattggaaataaagagataggagaattgtttggcactaagtccgcaagcacgatatacaacaaaaagaaaaaggcaagaactcttatgttggaaaaaggtcaaaagccatttgatttttttactgtaagtactgctacagcttatgaagcctgggggattgatgttgaggatttagaaaaaagaagaaataagttaaaaaaattaaatttgacctgatatagaaagcaaggtgaactatatgaaaagatacatgatggaatacgaaagcgaccaaattatatgtcgcagtaatatacatccgttcggatgtgctaattctttaaaaaccgcaaaaggatacataagcaaatgcaaaaaaataaatgctcaatataacccacgcaattttaaaatatatgacttatgtggagaatgtgcggaagatgaacatgcaccttgcgtttacgagcaagcctaaggaggtgaagtcaaatgtatagttggattatacgaatatcagctgcggtggtcggcgttgtattgttagttatggttaggctgcttgagtgttatcccatattttacacagcgccgcttatgatgatactttttgcttttctagattgcgctaaaagtacagaaaatggacaacccatagctgacgatgtacgcaaggtcgtaatcaagccggataatcggcggtgggactttgctgacgaagagtgctatagagaagccaaaaggccggaaagcaaaagaatacataaaattgtaatgtgaggtgattattgaatgcagtgtaatagggattgttttaattgtatttttgaggactgcatagtgaatgagctgctacctgaagatttaaaagaaattaaccaacgagatagagagattaggcgtgataataaagataataaacgtaaaaagatagcagaacgccagcgaaaatatcgcgaagagcatagagatgaaataaatgaacgtcagcgaaaattttatgctgaacataaggatgaattaaatgagcgaaggcgaaaaaattatgctatacacaaagatgaaatattggaacaacaacgtaaatatcgtgcagagcatagggatgaaataaatcaacgtaagcgaaaaaattatcaaagaaagaaaaataaaaagcccgtaagtgttggcgcactatacgagctaaacaaataattaatttatataatagtatcatgaactgactaaattgtcaagttattaaaaaggagataagaatatggaaattacaattaatgtacccgaattaaaagaattatcagaagcaataaaaactttatcgtctaccttaggctataataaatcagaactaaccgagcaggctgtacaaaacgcacaaattgaacctcaaactatgacaacttcattgccagctaccgaatcaaacgttgtatcacctgtgccggtcagcggagtgtctactaacggagtacctgttgatgggatgcctgcgtatgaccctatgcagttagctcaagcggccgccactttagccgataagggagacaactatagaaaacaaatattgtctttaattaacagttatggcgttcccactataacagctttgccggcggataaactgggagagtttgcaactcagcttaggggattgggggctgttatataatgccggacatacatgctaaacaattctcaccgagcggtgctgttaagtggttaaattgtccggggtcagcattgttggaagcaacactcccggatacagcaagcagttatgccaaggagggcactttagcgcactcgctcgcagaactaaaactccaaaagaaatttgagcccatgtctcagtctacatacactcgaagatttaataaaattaaaaaagatgagttttatcaatcagaaatggacaggcacacagatacgtacttagattacgtaactgaaatagcttacagctttaggacaagtccctttgtagcaatagagaaaagagtatcttttgaaaattacgctcctgggggatttggtactgctgatagtattgtcataggagataagaccatgcacgtaatagattttaaatatggaaaaggtaagagagtagaagctgagtgtaatccgcagggaatgttatatgctttaggggctttgcatgaatatggcctattctatcaaatagacgacatagttatatcaatagtacaaccccgaattgataatatttcgcaatacgttatatctagaaatgatttagagagttgggctgtaaatattgtacgaccggcagtagataaaattttaaacaaccttgaagagttccaccccggagaatggtgtgataaaggattttgcaaggccgcaggcagatgtagggcacaatgcaatagccatacagctttagaggattttagggaggctttgcctccattaatcagcgacgtcgaaatcggtgatgtgcttaaaagagcagagagcctaaaaaaatgggtttctaagcttgaagagtacgctttaacagctgtccttgacggtaaaaatatacccgggtggaaagttgttgagggtaggagcataagagcatttaaggattccgatgaggcgttggacagaattattcaaagtgggtatgatgaatcactattgtatgaacgtaatcctttgtcactcagcaaattagaaaaacaaataggtaaacaagagtttacgaagttagtaggcgatttaataataaaatctccgggaaaaccaaccctagtagtcgagaatgataaaagagaaccatataaaattggcgctgtaaaagattttgaaaatataggaggaaatgaaaatgtatcaaaatgatgctttaaaatgtttaacaggagaagtaagattgtcgtatgctaatttgtgcaccccacgcgcaaataatccgggtgaagatccaaaatatagtgttactctacttatacccaagactgatatagctactaaagcggaccttgacgcatcaatcgaagcggcggcacaggatggaatgcaaaggctttggaacggggttaggccaccaatgatgagaacacctattcacgacggcgatggggttaaggaaaacggagaaccatatggagaagaatgcaggggtcattgggttttaaacgcctcaagcaagcaaaagccagatgtagtacatagctcaaacttaaatgtacaattgtctcctggggatgtatatagcggtatgtatgcacgtgtaactatacgctttttcgcctatgcgagcagtggtaaccggggcgtgggctgcgggcttgggaatgtgatgaaaataagagaaggagaaccgcttagtggtaaatcaagcgcattgaatgattttaagggtttagagcagccaattcaaccgatgccgcctcagtatatacaaccaacacagacgcaacaacctcaaacatatcagacacaggtgcaacaacctcaagttgatccaattacaggtgcacctataggtaatatgcttggattatgagacatctatcaatagacatagaaacatactctagcgtagatattggctccggaggactgtataaatatgtacagtccccggattttgaaattttattatttgcatacgcaattgatgaaagaccagtatctgttatagatttaaaacaaggtgaaacgattcctattgaaataatgctggcaatgtttgacccgaaagtgaaaaaacatgcttataatgctgcttttgaacattattgtttgtccaaatatttttatcctgattcaatggttaccggtcagtggttaacacaatgggagtgtacaatgctgcacagtttgtattgcggatatgctgccagcctagctgcaactggtactgtaatgggattagacgaagacaaaagaaagatgacagctggaaaagctttgataaaatatttctgtgtaccatgcaagccaacaaagaagaacggcggtagaactcgcaatctgccaaagcatgaccctgaaaaatggcggttatttaaagaatactgtaaacaagatgttgttactgaaatggagatagaaaatagattaaaaaattttcctgtacccgcagatatgcaaagacaatggcaacaggaccagttaataaatatgagaggtgtaaaagtcgaccttgcattagtgaatggcgcattatggtgcggagaaactgaaacaaagcaattaatggatgaggctgtagatattacaggtttaagtaatcccaatagcgtcgctcagcttacaacgtggctcaaagaagaaacaggagcgggagtacctgatttaaaaaaagaaaccgttaaaactctgttggatggtgagcttaaaagtgaaaaggtgcgtcgaattcttgagataagacaagaattggggaaaaccagtaataaaaaatatacagctatacaaaattgcgtgtgtgaagacggtcgagtaagaggactactacaattttatggcgctaaccgcacaggacgttgggcaggtaggttggtgcaagttcaaaatttgccgcgtacatacatatcaatgcttgatttagcgagagatcaagtcaagcatagtaaagcccaaaacattaaaatgatatttggcagtgttcaggatacattatcgcaattgatacgaacagcatttgttgccgataatggaaaagtattcattgacgccgatttttcggcgatagaagcaagggttatagcttggctgtccggagaacaatggcgtcaagaagtatttaagacacacggtaaaatatatgaagcatctgcatctcagatgtttggtgtgccaattgagcgcataaaaaagggtaatcctgaatatgcactgcgacaaaaaggaaaagtcgctgagctggctttaggttacggcggtggaagcggtgcacttattaaaatgggcgcgttagataacggactgaatgaagcggaattgcctgatatcgttaaaagatggcgtaacagtaataaacagataaccgggttgtggaaaaaagtagaaaacgcagcgattgaagcttataaaaccggatttcctgttggcattaactcattaatgtttcggcatgaatgtgagctgttatacgggcaagattttataactgtagaattgccaagcaaaagaaaactttattacgccaagccttatttaggtaccaaccgatttggaaacgaatgtttgtgttattacggtatgaatcagaccactagaaaatggcaggaaacagaaacatatggtgggaagttgtcggaaaatatagtacaggctattgctagagactgtttggccgtgagtatatatagattgataaatgcaggatacaatatcgtattccatgtgcacgacgaagtcgttattgagacagatgaaacaaatggcagtttggaggatgtttgcagcttaatgggagagcctatagactgggctccgggtctactattgtctgcagacggttacacgagtaaatatttcaaaaaggattaacggaggcactaacatgacaaatgacagagttataaccataagtacagcaggcagcagatgggcaactttttggccgtctcaaaaactgttggtgtctgagctgtacgaaaaactaagagtgccggcacgcagcagcgaaaccttagatgactatatatctttaccaaaaagacaacaggatgacttaaaagatgtaggaggatatgttggaggggaactggctaatggagtacgtaaagccgccgcgataatgtatagagatataattacactcgaccttgataatataccaagtggtaaaaccgaagatattatattgagattaaatggattgggatgtggattctgtgtgtactccacgagaaaacattcacctgcggcgcctaggcttagagtaatattgccgataagccggagtgtaagtgtggatgaatatgaaccaatatcccgaaaaatagcgtggtacatacaacccgagatgagctacttcgacaaaactactttcgaagcgtcaagacttatgtattggccttcttgctgcagtgacagtatatatgtatataaatacgcagataagccgtttttaagtgcggacggaatacttaatacttataataattggtctgatatgagtgaatggccgcaggttccgggtgtgaaagaggcccatcaaagaatggcaaaaaaacagacagacccggaatctaagcccggagttataggagccttttgtcgtacgtacaatatttacagtgcaattgaaaaatttatacccggtacttatgaaccggttgatacattgccggggcgttatacgtataccggtggcagtacttccggaggtgcaattatttatgaagacggtaagtttttatatagtcaccatgcgaccgatccggcaagtggggttttatgtaatgcgtttgacttgatcagattacacttatatggagatttggataacgaggccaaattgaacactccaaataataaattgccatcttataaagccatgtgtgaaagagcagtagccgatgaagatgttgcagcgttaataaataaagaacgtcatgaatcagctgtaactgaatttaatggattatcacaggatgatgatttaaattggatgactcaactgaaaacaagtccgacgaccggagccatagcaaaaacaactgataatatactgataatacttgaaaatgacagtaatttaaaaggtcgatatggatatgatgattttacccataaaaacatggttcttgatactttgccatggagcccggaaaaagagggcaagcgcgagtggtgtgatgaagatgaagccggaataaggtggtacctggaacatatctatgatattaccggtaaagataagatactggacgccctggcaatttggggaagacgtcacgcgtttgacgacttaaaaagttatttgtctaatcttgtatgggatggtgtcgaaagacttgatagaatgtttgtactctatctcggggccgctgataatgagtatacatatagcgccacgagaaaggcaatggtagccgcagtggctcgaacatttgaacccggttgtaaatttgataatatggttatattgacaggcaggcaaggtattggtaagagcaccatgcttagaaccttaggacgcagaaaatggttcacagacagcttaaggtcattcgagggtaaagaagtatgtgaattaatacaaggtatgtggatagtggaaataagcgagctggaagccttaaataaatcggaagttggacgagttaagcagatattatcacagacaacagacagatatagagccgcctacggacgaaacgtgcaagactgtcctagaagatgtgttttttttggaacttgcaataacagcgactatttaagagaccggaccggtaatcggagattttggccgatcgatacgggaattattaagccacaaaaaaacatattcgcagaattagaatcagagattgatatgatttgggcggaagcagtctatagatatagtcaaggagagcccttatatttggaaggcaaagcagctgaattggcagaagcagagcaggaagggcaccgtgaaatatcctcccgagaggggcttattacagactttttagagcgcaaaattcctgtagattgggatggatggaagctatctaatagattaatgtattggggaggaaacatagcggatagagaaaaatatgagctaatagagcgtaacaagatatgtgccttagaaatatggtgtgaactattcgggggagattttaagagtatgagaaattcagacgccatagagataaatcgtatcatatcaagtctgccggactgggaaagacaaaaatcaccgcgtaaatacggatactgtggtagtcagcgtggatttagcaggtgcaatatacaaaaactacaatcttagtttatactttgtagtttttaaaagattgtagtactacaaaactacaatcgaactacaatgtttgtagccacggaaacacctgaaatcacgtggggtaacgtctaaaaactacaaaactacaaaaatctatatatagtaataattaggtatattaggtaatacacataacgcctagcgcgcctaatgcgtatacatatacgcgcgcgtagagtttgtaatctgtgaggtggattaagaaatgcgagaacgagatgttgaaaggtatttaagagagagagttaaacagctggggggaagggcttataaatttgtgtctcccggaaataatggcgtaccggatagaattgtgatgttacccggtggaaaactgttttttgtggaacttaaggctccgggaaaagaaacaactgcgttacaagatgcacaaattgaccgtatatctaaattgggacaagacgtatttgtggtagacagtaaagaaaaagttgataatattttggcggtgtcaaatgaaatataatccgcataattatcaaagctattgcacaaacaggattatcagtgatgataagctggccttgtggcttgatatgggcttgggcaaaacggtaatcactcttacggcaataaatgagctgaaatataatcgctttttaatttctaaggcgttaattatagcgcctaagaaagtagccgaaactacgtggagccgagaggctgaaaaatgggatcatttaagactgttaagggtgatgcaagtgttaggttctaaaaacaaaagagaacaagctttaaatactcctgcggatgtgtatgttgtaaatcgggaaaatgtgcagtggattgttgaatattatggcaacagttggccgtttgacatggtagtcatcgacgaaagcagcagtttcaaaaatcatcaagccaaaaggtttaaggcgttgaaaatggtgctgggtaaaatacacagactggtagagcttacaggtactccggcgccgaaaagtttgatagacttatgggcgcaaatataccttcttgatgaaggagcaagactgggaaagcgaataggtcattttcgcgaaacatattttgatcccgatcagcgaaacgctgagaggatattcacatataggcctaaagaaggagctgagaaaaatatacagttgttgctgagtgatatttgcgtgagtatgaaatcttctgactatttaaatttaccggaaatgacagtcgtagatgtgcctgtgatgcttgatggacgagcccgtaaaatatacgatgagttcgagcggagtatgttgctgaaaatagacgaacaaacggtagacgctgatacggcagcagtgctgagtaataaactgttacaagcggctggcggcgaggtctatgatgacgagcatacagctatgcacattcatgattgtaagattgacagttttttagaacttgtagaaggactaaatgggcagtcagctatagtgttttatagttttcagcatgaaagataccgaatattaaaagccctgaaaaaaacgtctcttaatgtgagagtatataatggaccgcaagatgaacttgattggaataagggtaagatagacatactgctggcgcatcctgcaagtacagcttatggattaaatttgcaagatggcggacggcatgtgatttggtttggattgacatggagtttggaattgtatgcgcaggcaaacaaaagactgcatcggcaaggccaacagggcgaagttataattcacaggcttatagctgagggaactagagacgaagatgttattacagctttagaagataaaggaaatacgcaggaaagcttattgagatcactcaaggcaagaatagaaaaagtaaaaggagcgaataaaaatgcaaaaaacagcagaaagatataatattttaaaagcgataaattattttacagaaatgctaactttggtggaaggagaagaaagagaaatgtataagttagcccttaacgcgttggacagaatgagttacataataccggtattacagggcgacaggatgttgtgtccgagatgtggtaaaccttacacttatcgcgggccgggggataaattgcaagggatacgcatatgcaacaactgcggccaacacatgcaatggggcaaggatgaaaaatatgaaatatgacgaaggaaagccgaaacttaccttgtgcccaaccgacataattacagcggttgccagggtaagagaatacggagtaaaaaagtatggagacagtgacagctggaaagatgttgaaccgcaaaggtatagagacgcggctttcagacattttgtgtcatacataaatgacccgtcgggtgcagacgaggaaagcggactgccgcatttgtggcatttggcttgtaatattgcatttttgtgcgccatggaaaaggactgaaactatatagataaaaaagtaatttaacagacaaagaattattatcaaactggatgtgataaatcttatgacagctgaaagattaagacagtacagaagtctaaaagtagaaattgaagaattggccgaacagatacaaatgcttgaaagttctgacattgtgcaggggtcggacaaggagtttccgtatataaaacataacatgaaagtggaaacaggagagtgcgaccacacacgtgatatgttaaaaaaagagttggggttattaaaatccgaatatcacgcattgaatgaatttattaacaacattgctgatagcgaaatcaggcgaattttcagatacagatatattgaggggtggacattccaaaagattgcttttaaagtgggcaatggtgatgaaagcggcataagaaaaaaacataataaatttttaaagttgtccgaattttccgaaaattacatgttataattgtattatgaaaggtatgcaaagtaatttctccttttatatattttttgtttaagagccgttttcctttttgggacggttcttttagttttaggtcttgtgggaattgtacatcataaaatttgctgaggggcgggcggctgtgatgtgatttggaggtgagatatttgaccgagaagcagaagcggttttgtgatgagtatttaatagactgtaatgctacaagagcatacaaggctgtatataatggtgtaaagacagacgatacagctagagtttgtgcctcaaagctgttaacaaatactaacgtaaaatcttatattagtgagcaattagaaaaattacataataataaaatagcagacgcaagagaagttatagaatatcttacttctgtaatgcgtggagaaagtgaagccgaggtgcttgttgttgaggggcgaggcgaaggatattcagaagctaggaaattcaaaaaggcacctgacgagaaagaaaggttaaaggcggcagaaatgctaggtaaatattacacactgtttacagaacgaacgcaggttgatggaatagcgcaggttcagattttagacaatattccaaagggtgatgatagtggttagcttaacagaccttatcgcgccctctttttacgctctgcaccatgatgtaaagcaaggcagacatacacactactggctaaagggcggcagaggcagcacaaaatcttcttttatcagcgtggaaattgtgcttggtataatgagtaatccgggcgctaatgccgttgtagttcgcaaggtgggtctttatcttaaagacagtgtatatgaacagcttgtgtgggcgatagaaaagctcggggtatcacacctttggcaattcaagctgtctccgcttgaactgatatatcttcccatggggcagcggatattattcaggggagcagataaacccaagaaactgaaatctaccaaggtgcacaaaggatacattcgttatatttggtatgaggaagtggacgaatttggaggtatggaagagatacgtacgattaatcagtcgcttatgcgcggaggtgaaatgtataatgtattttactcttacaaccctccgcaaagtcagcggaactgggtaaatgaagaggtattgacaacgcgaagcgacagagtgatacaccacagcacatatttaagcgttcctcctcagtggctcggcgaacagtttattttggaggcggagcatttaaagaagacgaaaccgagtaattataaccacgagtatttgggagaggttaccggaacgggcggcgaggtgtttacaaaccttgatgttcgcgagataagcgaagaagagattgcggtttttgaccggatcaggcggggaattgactttgggtatgcggttgacccgtttgcgtatctcgtctgccactatgacaagacacggaagcggctgtacctcatggatgaaatatacaaagtcggcttgtcaaatcgtgcggcggcggagttgatccaagggcgcgaggtgtatgacggttacattgtctgcgacagcgcagagcctaaaagcatagcggagttaagaggatatggccttaaagtacgcggagcaaagaaagggcccgatagtattgagtatggtattaagttcctgcagtcgcttgaagcaataattatcgaccctgtgcggtgtccgcatgctgccaacgagttttataactacgagcttgaacgtgacagcagaggtgagtttaaagcttcttaccctgacaaggataaccacacaattgacgcggttaggtatgcgctggaagatgatatgagcaacagaggtattgagataagaagcaggaaggagctgggtatatgatagttgacgctgagacggtaaaagaggttgacggaagaatattgggaaagctgattaataaacgtgctgaagatacggcacggcttatcaagcttaaagattattatttgggaaaacatgatgtgctttatcgaagacctaaaggcaaaggcttgccgaacaacaaaacggtatgtaaccatgcgaagtacatagttgatatgacacaaggttatttgcttggcgcgcccattgcgtacagtgcgtcagacggtattgatatcggaccgttaaaggaagcatactttgaaagtgagatacaaaatacagacagccggattgtacgggatatgtctatttacgggcattcatatgagttggtttatgcgaatgaagattccaaaccgaagtctgctgtgcttgaaccgcggcaggcgtttattgtttatgatgatactgtagagcaaagaaaactgttcggtgtgcattactacacgataacagatatagacggtctggaagtgggtaaagtcgctaatgtttatacagaaaacgaggttataaaataccgaagcacagggggagggagcgtttatgaagaaatagagaggacggcgcattcatttggcagggtgccgatgattgagtatatcaacaatgaagacaagcagggcgattttgaacagcttatcggtcttatagacgcatacaacacgctgatgagtgaccgcgttaatgataaggagcagtttgtagacgctatattgttccttaaaaacatagaggttgacagcgaaaaagccaaagaattattgactgaaaaaataatgatgtctttcacgccggacgcggaagcaaaatatttacaaaaggttctaaacgagactgatgtagagatactgaggaataatatcaaggacgatttacataaattttcattaacgcccgacctcacagacgagaatttcggcaataacctttccggcgttgctataagatacaagcttttggggtttgaacagcatgttaagaataaggaacggtttttagttcttggacttaaagaaagatttgacctatatgtccattatttatctttactaagccgtatgagtgtagtaagttcgggagatgttgactttatcttcaatcgaaatcttcctgagaataatttggagctggcacagacgattaattatctgcgcggtcttgtatctgatgaaacattgcttgagcagcttgattttgtgtccgattcagcggaagaaatggagcttgtggaaaagcaggaggaaagccgcgtagagcgcgagataaagcgcgaggaactttacagaaagagcacgggcgcggattatacagcgcttgaagatttaactgatgagaagcgctgattattggctgagagttgcgctaatgcgcgaacttgatgcacacaaccgcggagcatacacaatacaagagcttaggcgtatgtatgacagtatcataaaagatatcgacaaagaaataaaaaagatattcaacacatacaaaaatggtgtacaaatcacagccgaggaagccgaacagcttattaataaagcggagcagaaccaaatagcagataggctgtctgaaatattaaaagacacggaagatccaaaacagcggcttgaacttatgcgcaagatacacgcgcaggcatacggggcaagaattagccgtttagaagcggttaagcttaatgtatatgcttatttcaaagaaaaggcactaacggagatagagaaaactaagactttatacaacacggttatagaagaaagctattacagaaccgttcacgacatagcaaaaggctgtaatgtaggtgtatacttttctcttatacctaagcgcgcagttaatgaaatgcttgagagtaagtggcatggcgaacaatttagcgatagagtgtggaataacacggcaaaggtcgctgagcagtcgcagaagataattacagaagggataatgagccatgcgggatatacgcaaatggctgcccggcttgctgagataatggaaacatcaaagtataacgcgcaaaggctggttaatacgcaggtcagttatttcatgaacatggctgaattgagggcttatgaagaattaggaatagagcaatacaaatatcttgcaacgcttgatgagaggacgtgcgaaagctgttcgccgcttgataataagatatttaaagtcagtgaggcggtaggtggtgtaaattatccgcctatgcacccgcattgcagatgtacaacaacaatgccgacagactatgcaagacgctgggcgcgcgaccctctgacaggcaagggctataaaataaagggtatgagttacaatgaatggattgagagcctgacagataagcaaaaagaaacgtttgataaacatgttgttatgtatagaaaccgcagttccgataaaattttatatgaaaaatacagtcaaatttatggtaaggaatttccaaaaacttttgacaaatttcaagatataaagtataattatgctagccaatgggagacgtttaagaatggaaaacaagaccgtttaaatatgatgagatttgatgatatgagcgggcttgttgggaaacttggtaataaagaggttagattatggtataaagctaaggatgaaaatatacctggcttgattgacagaactcgggctttagaacagcaagcgcgccaggcttgtgggttaagaaataattataaatttcaggcacgcgaacttatgaaagacaaagctgcaaggaaatatttagacgaaaacgagccatttaaatcgtttgaggatttagtcgataagaaaaaaatgaaatataaatcttacgacgatatttataaagatataatacgtagcagtgcaacaacaaataagtcctatgatgaaaaagcgggattgaaatgatgaggtgaatatatgaaagcatttatcagagataatacaatactaatagaaaattttgagttgaagtcagagagaccaatttttgaggctattgtgaaagaattcaaatcaaataataatatcgtcattaaacgtgagattatgggaccgtctgaagacattgtgtctgccgaatataataatggcgagatattcttatgctatgatgtagattatgaattgtgtcctattaggtgtaccgagagcaatatacagcaagtttttgagattgtagataaagttataaataattaattaagcatctttgcaaatgcagggtgcttttattatgcccaaaaatgaggtgatgacatgaggtcaagagacccaacaaattaattaaaataaataaagatgatgagcggagacgctctttttttatacccaaaattgaaaggaggattttaaatggcagaaaatgcaaaacagacaggcggcgctatggtaacgccccaaacaggacaaaatgttgcagacctggcaacgccgaccggacctacagaaccggccgcagggacggctgtcaacgcgggcggcaccgatgacgttcaatccaaaattgatgaagcattaaaggcggcgcgcaagaagtgggacgcagagcttgaaacaaggttgtcggaagcaataagcgaaagtgaacgtcttgccaagctgaacgcggacgaacgagcagaagccgagcggcaaaaggagcaggaaaaatttgagaaagaacgcgcgaaatatgagcgtgaaaagcttgaatttgaaacgggtaaatcacttatggacaaaggactttcgcctcaattcgcttcatttttggcgcaggacaacgccgaaaccacaaaggcgaatatagacgcgtttgaaaaggcgtttaacgaagaggtgcaagctgcggttgtcgataagctgaaaggaactgtcccaaaggcggggacagacaaagccgctgcaataacgcaagaggcttttaacaaaatgagttatgcagagcgcgtcaagctgtataacgaggacaaagaaacttatgaaaaattaacaggaggtaatcaataatggcaacaggaacaacgaagcttgaaaacatggtaaatcccgaggttatggcgcctatggtatcggcaaagcttgaggcagctatgaagtttgccccgcttgcgaccattgacagaacattgcagggaaagccgggcgataccgtcacgcttccaaagtatgcgtacataggtgacgcggaggacgtgggcgagggcgaggctattccgattgagaaaatggcgacatcgaccacaaaggtaagcgttaaaaaggcaggcaagggcgttgagcttacggacgagtccgttctaagcggctatggcgaccctatgggcgaggcggtaaatcagcttgggttgtcaatagcaaacaagcttgacaatgatgtgcttgctgtgcttgataatatcatatccgctatgacagtcggagatggcacggcaacgctgacttcaaactttatagcggacgcactcgttaaattcggagaggacatagacggtgaaaaggttctgcttatcgctccggcacagctggcggagcttagaaaatccgaggactggattaaagcgaccgacatcggcgcggatattataattaagggcacggtcggcatgatacacggctgtcaagttgtgctttctaacaagattaaggcggagaacggcgcttatacgaactatatcgttaagcccggtgcgcttgcgatttacctaaagcgcgataccgagattgaaaatgacagagatattgttaataaaaccacggttatcacagccgacaagcactatacaacgcacatcgcggacgacgccaaggccatcaagattagcgcaaaggagtaataccctatgggaatgttattaagcagacacaggaaagcaagaaaagccgtatctgacgataagccgaaggcggaggtgagaaccaatgttaaacaaagcgaacgcgctagaaaccgcaaaaatgcttctagggatagagggggactgcagggataacctgctgtcctttttaattgaggataacataaatctgattttaaactattgcagaatatcagattttccgcaagagcttgaaagccttttgccggttatgaccgccgaccgatataggcgcgcaagctatgggcaggaaaaagcagacaaggttgtgaagtcggaaacacagggctctgtaagcaaaagctatgaggacagtacggcgaacgacaatcattttctcaataattaccgcgagagattaaagccgtttattaatcgtaaagggagggttccgagtgattttgatgaacctgaaaaaaacgattgaggtatacagcggcgctgaacttaaagctgaaataacagcagatattcaaccatacagcggaggtctagcacaggaagaatacggacttgaaattgagactgtaaagcgtatttactgcgagccttgtacatttcttgaagaaggcgccagggtcgctttgaaaggtgaaaatataagctatacagtaaagtatgccgaacattgggacgattatacaatggctcttttaaacaagctgccaacagccgtaaaagatgagagcgttaacgttaacacgggagagaacggcgcaagtgatatatatgggggtgggttttattgattgatttaattccacaagtgaaaaaactgcttgaaggcacaggaataacgattaaatatggcacggagtttcattttaacaccgtgcctattatcacgtttagaaaagtgacaacggacgaaggttttcacgctgataacgccgagcagtctcaagtaagcaagtttgcagtggatatttggagtaattcgcccgttcagttatccaatataggcgttaaggtcaatgagataatgcagtcggacggctggacaagaacttatgactacgatgttccccggcaaagctctgatgaattatatcatttatctcaaaggtataaaaaagaggtatttttttaaaatgaggggtgacaatgggaatcaatattgaaattgatgggcttgataatatattgggcaacttagaaaatatatcatctaaacttgacggcgctgtgcaaaacggggtggcaaagggcggcaaagctatacaagcccagtgcaaaggcgagtgtcctgttggtgatacaggtgctttaagaaacagcattgtggaagaaacaacaggcggagacggagaatatacatctgagataggacccacggctgattatggtatatatgttgaactgggtacaggtatttacgccggaggacgacaaacgccgtggaggtatcaggacagcaaaggacaatggcacacgaccagggggcaaaggccccatccgtacatggaacccggttttgaagccgggaaagatgaagcggttgaaatattaactaatgaggtacaaaaagcaataaattaattttaggaggtcattaatatggcagtaaaagaaataaataaaccacattcaaaaattggtgtatcaaattataccttttttcctataacagctgatgatatagcaacagggaagactacatacggcgaggcggtgaccttgccaggcacggttgaaatcgctccaacagattcaggttctacctcaacatttgacgcagataatggagcatatgaggtagattcatatgttgaaaaaatgggtcatgaaatcaccaacgcagatataccacccgaggttgacgcaatgtggagaggtgcggaacttgtagacaacggcgttgagttcaacaaagacacagcggcaaaggctgaatattttgcggtggcgtggataattgaaaaagccaacggtgtaaaacgtttggttagatactataagggcaaatatggttttgcctcaaatatcggaggcaagacaaaagcttctgagggcgcgcccgaacatcagacagccaaagccacattttcagccgtattccgtgattctgacggtaaaggatattactatatagatacagacaatctgcctgatggagtgacggaagaacaggctatagaaaactggttcacagacccgaactggtatccatcagcaacaccggaacagggggcttaatctaatggcaaaagatttagaaaatatattgactataaagattaacggcaaagaagttcaatcaaggccgtttaactttgctgattatgcagatatgcaggacaagcatttaagaggatactcaggcgcttgcaagctgtgttatgatgtgcttatacgcatgttcaaaggcacagcggccaacaaggaatacattgacacaatgtctattgcggaaaaagatatgctgtgccggaaattgcttgacatatatttaaacacaataagcgaagtaaacgaacttataaaaaaccagtaaagtcggacagtgacgaaacttttaatcttaatgatatatatggagtaatgtataagtcaaaagggatactgcccgacgagcttgcaagacaaaatccggtcaaattaatggaaatgttaatatctttaaacgaagacgaggaggaaaactctgtcacaaatttgcctcccagtctcggctggatgaatggattataaaaatatattgtgcagttttaggactgcacaaagcaaaaagcattttaaacagtgttttttgctttgtgattggcaccctttaggggtgcttttttgttgcggaaagaaaggcgggattatatgagcggaaatttaggggaattaactgtaagatttacgggtgacgcgtcgtcattaagttccactatatcaaaggtacagtcggaattgtccggtatgaacgcaatgtcgcagaaaggtgtgaaaagcattgcggagcagacccggcaaatgggcggatatgataagatagtcgcaaagtcggctgaaagcctaaagcaaaagcgaagtatattagctgaaacggaaaaagcgtataagcaaaatactaaacagctgaacgataatataaaagggctaaacggtcagaaatcggctataggcagtcttatgacttcaaaaaaagctgagattcaggccttggaatccgccaatgcaggactgaataaaaatagtcaggcgtataaggataatgttaaggcaatccagtggacacagaatgaatataaaggattgcagaaacagcacgatgaagtatcaaaatcaatcctgaataatgaaagcgcactgaagaaagaaagcgctgtatacagttctgcaaagtcggctgtagctaacgcaagtcagcaatataagacacttgctcagaatcaaaaagctattgtaggtatggaaaaggctttaaatctacaagatgttggggaaagctggcaaaaagcaggacagagcattgacgcaataactaagcctatacagcttgtaagtgttgcccttgcggctgggggtgtagcttctgccaaatttgcaatagattttgaagataattttgcaaatgtaaaaaagactgtagatggaacagagccgcagcttgagaaagtaagacaaggtattatagatttatcaacaacaggaatagacggcagaaacgccataccgcaaacaacagcacagttgacagaacttgcggcaaccggcggacaattgggaattgctactgatgaaatagttaattttaccgaaactatggctcaaatgaataccgctactaatttgaacggtgcagagggtgcggcaattcttgcaaaatttatgaatgtaaccggtactgaacagagagaagtaagaaacttgggcagtgctattgtggatttgggaaaccattctgcgacaacagaggcagatattgcgagcatggctcttagacttggcagaaccggaactgttgtcggtatatcggcgcaggacgtattaggttactcaacagcgttgtcgtctttgggaattgatgctgaagcaggaggcagcgcagtgtcccgtacgtggactaaacttcaaaacgcggtttcacaaggcggtgaagatttagacaatttttctaaaatatcaggtatgtcagccgatgaatttaagcaggcatgggcagaaagtccaagcagtgcatttaattcttttgtaaaaggtctgtcacaatccgaggatataatatccgatttgcaaaacgtaggcataaacgacgttagggaaggcgacgcaatgaaagctcttgcaaccggatatgacaagatggtttcagcactgcaaagggcaaacactgcatgggaagatggaacagcgctccaaaatgagtttgacgccaaagcagagacaacagcaagccaaatacaagttactaaaaataatttggttgaagccgcacgcggtattggggaaacatttttaccgacaatcaagaatgtatccggcggaataaaagattttgctcaggatattgctaatatggatgatgacagtaagcaaggacttattaatatcggcaccgggcttattggtatgggtgcaggcgcaaaagtaatagccgggactgcaaagggagtaggtaattttgttgaaactttggggaaattaggagttgcggcaccaacattagctagtatgggacctgtagccctagcggcagctggtggaattttggctgttggtgcggcggctgtagttggtgtaaaagcttatcaagaatatcatgacgcccaactcgacgttgtaaaggctaccgacgaacaaattcaggctactaaaaagagtttagatacatatacaaagatacaggggtggaagtcggaagcacagcagcttgaaactacaataaaaacttctactgatacggaagaggtagacagagcaaaaaagaaacttgaagaactaaaagcccaggttgagcaagaatataatataacattaactgcaaatgatggtgatttaaataaaacactagaaaagttaggtaatagggctacaagcgatttaagaggtcagcgcggagacctacagcaacagattaatgaaagcgactttagtcaagctgtcagcaacatgaaagattatgataatcaattacagacagcgcaaaattcggttgacaaatactcatcggcactcgcaaagtctaaggacatcatgtccgattataggacagagcaaaatgaactaaaatcagcagaaaaaagtatgccgagagatgaatatataaagaaacaaaatgaattagccgaaagttacgaaaagacattaaatgcaatgtatgaagctgagggggtctctgataaagtaaaagctcatgctttgacagacccttatggcaacgctaatattgatgagggtattggatatttaaaatcagcattgagcgacgcgcagacagaggtcaacaatttatctgctgattttgacaaatccagtgcagaggtggaacaatacaaggaagctgtgaagggcgttgcagatgtaacaagtgctttagtgcctgaacagcttgcgaacggtgaatattctcaggctttaagcggaataaaaacagctttgggtgatgtgaaatcctatactcaagaaatgggatttgacaaatttgccagtgacataacagagcaattaactgttgcacagcagggatttaaaaatatagcccaggtagcaaaaagcggtgataatggtataagcaactttttcagcgactttgccagcaatgctgcaaaagccggtgcaggtgcagacgatatatctaaatcattagctagtgccggaaccgctttaattgagaatggcgcagacattaataatactgttgataaatatataaatacaagccaaaaattcaatgcaagcgcagaagacacggcggtaggagccgcacttataaagaatggttttagagatatagcaagtgcggcggcaactaacggcggcttagaggtagtaacagaacaagctaatgaacttgctaagtctatgggcgtactttccgataatcaacgtatacatattaccgcagagggtgatatatcaacaattacagaaattgatggtaagttacaagagataaacggaaagaatgttgatataaaacttaataccaaaacagaaaattatgaggtattggacaaagccggaaataaaatttctgaaattgacggcaagaccgcaactgtctcggttaatgccaacggaaactatgatgtattgaatcaagccggtattaaaatagccgagatagacggaaaaacaggacaggttagattagaggtatcagacggagcgacaccaactgttgagcaaataaacagtgcagttggggaattggacggacgcgcggcaagggttgaagtagttgctggcggaaactacgaaatttttgataaaactggtaacaaaatagctgagatagacggaaaaaccgctaaggtaaatattgttgagggtgacacatcaggattagaagccgctgacgaagctgaaaaattagacgataatttttctattactattactgcagaaggtgatacagcgcaaattgaagaggtacagactgcggctgaagctattaacggtcaacaatgtactattcaagttaatgcagagggaaattatgatgtattagatgaggctaataataaaatagctgaaatcaacggacaaacggcacaggtaacagttaacgcttccgataatgctaccccaattgttataggtgtggcgacgagtatagggactttaccgcaaagcactaatactcaaatcaacgctactgataacgcaagtggaactatttcaagcatagccggacaacttgcgagtttagacggaaaaagcgcaacggtgacggttaatatacaaacaaatggaacattgcctagagccaaaggcgataaaaatttcccaggcggtatggcaatgataaatgatgaaaagggaacgtcagaccctagggagcttgttgaatacggcggcagagggtatatatttgagggcagggacgttgtactgcctttgcctgagcacgccaaaatttatacggcaaagcaaacaaaacaaataatgtcaggcgcaggaatccctcgttatgcaagcggtaaaaataacgaggattgggagaacgctaagtctgacagggaacatatacgcaaaacctcatacaacattataccagcctgggaagagcttgaatggctcgaccaaatgaaacagaaatttgcttctgacgctgaggttataaaagaaatagaggaagaaatagtcaattatacaaaagatctgtggagccaaaacttagaatcaatggaatttgcgcttgatatgggctggacatctcaagaagaatactataataaccttgccgtgttccgggatgaaaattttgcgcccgacacgaaggaatggaaagatgcaacgctcaagttacataagtacagtcagcagcttattgacgacgcaaataaaacgtccaaggcgtatattgatttacacgccagtataaacgactggggcgaaatgggtacaagcatgggcgctgtttggcagacggttaaccagcgtaatgttcaggcggcaaaggacggattaatcacctgggaagattattttgataccaggcttgattacacagagcaatttttagacagttatttagcttactcggatgactgggtagagaatgaacaagagtataacaatatgtcggctgctgacactatagcggcagttaacaggcagagaaaagaggttgaggaatattttgcagggctcggagaactgaccgacgaagaaaaggtagtcagaattaaggtagaagcagagctggataagaaaatgtatgacgcggtcagagacaaattgagcgaatgggaagacgacgcagactggtatgagaagcaagccggagtatacggctgggattttatgcatgatgacagcgcgacagatttttaccaacgtaaaattgatgaatacacaaaatggtcgcaagatgaaagcctggacccgactaaacagcaatatgctcgccgtcaggctgacgaaatgcggcttgaattatacaaagccacagaggacagatatgacgaaatgctggatatggctaaagaacgtatggacgaggtcaaggacttgctcgatgacaagctgtcagctctggaagaatcctgggaagtggaagaccgggcagaagataaggctgaaaccctgtcagatattgagaaatataagaatgctgtcacgatagagggaaaacaaaaatatcaggaagcattagacaaactcaaagaaatagagcgagacgaacagcgttatcagatagcgcaggaaaataatgccataataaagcaaatggaagctgaatataaggcgctggaggacgaaaagacaaacatattacagcagacaaaggaagcaaatttaaaagttgcctcggttgttgagcctctggaacagagtataaatttcaatatggataatatggccgacaagataacaacagcgataaaggaaattaagccgagtgtaacaattaatcaagaaaatacaaacaatttttatgacacgaccgataatatattgtacagtaaaaaatatctaaccgatatggcaacagcagtaggaggctaaaaatgagacatggaataacatttaggggtaaacacagtaatgatattggcgtaatcgtaaagaccgttggaaggccgttttcccctccggtaaagcagatagatgaggaggttcagtatagagacggaaatattgacttatcggaaacagggggcagattatattttgaagataaagttttggagcttgaatttcagatgatatgccctgataatatcgctttgcagcgttcagcctctaagctggtaaattggttaagcggtggttatggagagcttatatttgatgatatgccaacagtaaagtggatagcaaaacctgttgacctagatgatatgaaaatagagctttataaaaacagcaaagctactgtacaatttaggtgccggccgtttaacgactggctgcatgacagttcggggataccgctggacagcgacattattttggactgtgatttacccataggaatgggagacgaaaacgaaataagttttcaggcaggaacaacagaaaatacaatgatttattatggctcagcacctgtcagacccggctgtgagttatctctgtcttctgccgtgaaaatgcttgatgtaacagtcaatggggtgatggtgcgaataattcccgaatctgaaactaatataattattgactgcgaaaaagctattatgcccgagatatgtgagggagatttttttgaactacagccaggagaaaatacaataaagattatatgcaccggaggtcagggcgtgctgaagtttgtgtataatcataaacttttatacggaggagaattttaatgaaatttatagcagtatatgacaaagacacaaaagattatagcggaaaggaccgtttgggatttttagagaatgcgaaggaaatacatatcagacagacaattaacggggaaaacgacattgaatttgacctgccgaacggtgatgataagtgggctattgtggaaccggaaagaattgtaggttatgacggcaaatacttcagaataaaacgaattgaagggaagcatatatctgctgcaacattaatgcaggacgcctgcagaacacatatacaacatatagacgacatgataaatacccctgcgaataaaatcgtggagggtatttttgcaacgacgccgtatgtgacagtgcttacggagcaggaaatcagagcgttggggcttgaacctgtgactgacagtatagatttttttgagcagtcgaaaactacgccgataggctgtcttaatatacttatggagacgctgaataagtacagaatacacagtgaaatatatattgacaacagaaagattgcacttgtgcgaaaattggggaaagacagaggggtcagaatagacccaaaatacaatgccagggatataaagattgaatatacaacgtatggtgttataacaaaactgtacccatatggtaaagatgatttaccgctgggagagatacaatatataaaaagtcctaactatgatatttttggagaatatgaagcattctgcaactttgacgaaataacagacgcagacgacctcagaagcgcggcagagtatcaattttcgcctgataatatagacagggcggacgtgccgaagtattcggttacaggcaaacacttgtcggtgaaacaggaaatattcttaggggatacggtgacagtggtagacagggataacggaataacctcaaaacaaagggttataatggtagacacatatccaaaggcaccggaaaagaataattttcaagccggacgaccgtctataactatacaggaaggatggaacacgtcttttgccgcatcgcagtatttaaggctaagaaagaacggagcagcacaagagttaaaaacaagcgctcttgaatttatgaaaaagaacactgacgtaactgttgaaaataacggagaatatcaaaaaatagcgcagtataaaacgggagcaatgttcgtgtcccctaacggaatgtacgctgtcgcaataatagacgggaaaatcaagattggagcagctgacaaaagtcgtgacgacggctggaactggattggagtatttggtcacggtgacggcagcgattgggcaacgacatatctatataccaacttaatcaccataatgtcagagaatggaaaacttaaaatagaggacaatctaatcacaatgtacgacggaaacgaagtattaagattccaggcaggttataacggaacccgatatgtatttgagttatacgacgaaagcggtaaaaggtcgctatatatggacgacaacggaaatttgacaatttgcggtgtgtttatgacgggcgaggacggcgaagcaagaaccgttatagacggcaatggaatcaagagttataacgaaaaaaatcagttacacgggttagttagtaacttagataaaacatggggcgatttaaatattttttacaacggcaaagaaatttttagggtatgtaatgaaggtgccggttctgttgtagtaagttgtatatcaaaagaagtaatacgtttaagtgatattagaaacgcattagagggtacatggtattataagggagcggaaattgcaacaaaagatgatatagaatctctacaagctcaaattaatgcgttgaaaggtatgtaaattatgaagataaacaaaactgtcaaaatgacagtttttattgacattcgtttatgctatatgatatattgataataatatatagcgaaaggatgttattttatgaaaaaatttatttgtggcctagtaattggttcgatttgtacactatcaattggaagtctagcaaacggtgtttgggacaatatcagcgtgctaaaaaatgatataaatgtagttgttaatggtgaaactgttacagcagataatttcttatataatgatattacctatttgccgcttagagcagtatcagaagcccttggtgaaagtgttaattatgacgataaaacaaataccgcatatatcggactgcaaaaaaacagtgaaacaataacaggtaagtatactccaccgaagggaatgtttgaaaaaaatcttgtaaaagtttttaatggtcaatattatttaacagaaaatggaatattgacatattattctgattatttcgacggaaaaaatacatatgtaattggggatagagatacaatgacatttacttttaaattttctgacggtagcactaaaattttacctatagtgcttattgagagtattggaggatatggaatattgtacgacacttttgttgatgaaatattaccattaatgaaatagggagagctgtatttttctaattgctttctgtaaggtgtaaggactatcgctcaaaaatgagcgatagtcctttattgccaataattgaaatagaaaatataaaaaaagaacaacctcaattactgcccagtaaaagattgttctacgcaatttaaaaagacagaagtctctatttgaatttagtatatcacacatagagacttctgtcaataaaaatattggtataatataacacttatatatttttgcggtcgcactacacatgagtgtgtgaatttaaataaaatatggacttttgtacaaatttgtacaaaaggttaaaaccctatacagggatacatggatttgaattattttaggttgttgcaaaaaacgcaacaaccttttgtcgtatactatatgggtacatggatttaaatgttgccacttgtggcaacggtagtaaagcccaaacgtcgcaccccatgtggggtgagtggatttaaattgactattactcatttttgagtaatagggttgacggtcgcatttcgtgtgtgtggattgaaaaatatgaacgtccaaaagggcgttctttttatgtatataaaaaaagaaagggtgataaaatggcaaagcacaacataaacgaaaactataacggtcaaacgaaattgcgacattggtggacaatgataagagataatctgtcaaatctgatggggtggtacaacagccatatagacggcacggcagatagacacagggcggaggatatagactacgacgacagcggcactgttaaggaaaaaataaataaaatagatatgtctctgtttaagcagacaaataaattgcccgatgaaatattaacaccgggcttttattatgggggaggtgttgttaatggtacgttaggaggcagcggcacatattggtttgcaatagagatatatccggtttttacaaatctattgcagatacttcatcaaaatgttaatggggagtggacaacatactacagaaatgtttcaggcttagaaagtgatactccgcagtttacggaatgggtgcggctggcgaaaatatctgatgtaactgcattaaggactgaggttattaaccaaatagctaatgaagttaacactcgtattgaggcagacgaaactataagaaaagaaataccggttaaaacaatagagaacataacctcagaaaccacagataacagcagctatgtaacgccgcttgtagttaagaatgctataaataatcttgtggaaagctctgaggaaataaaaaacattgctgacgctttagtccacaatgcgtatgcggtgaataagcttcatgaaaaccttgaacttagtttggttgttccggagcctacagcaaacagtgttgtaatgacaacagattcagacggaaaatataaattctcttttacttttcataacgcgtatatagattcaaacggactatttgataatggtttcagcagtcagattaataacacgtttgaaataaacatgctcggtacaatagagtttggcataagatattatttatatcttgaatgggatttgatgcgagataaatttacgatgtttggcacgacggataattttgggacaaacctggatatagagtatctgcaattttatgtaggccagtttaccgttgtggatgaaagagcagttgattattatgatgagcaggaaaaatcatcaatcaatattataccaatgatagggaattatctgtcgagactggattcaaagtgtaatgaactgcaaagagacatgggaaaaaagaatacggcggtattatttcagcaaataggtaagtcagagagattcagcattaatcagtctacaggggattgggtggtaggatatagcgtaccgaaaattaatattatagacgatacatacggtaattttatactgccttctaacattatagatattggagacaccaaaactaaatttgggactgagaaaaaatattgttatgcttcttacacactcaacactgataacttatcaggtgaaataagcggttctgatatgacagtaacatacggcttaaaagatgcaaagggaaagccaaacagctatatggagatagaggacgaaacgaaactgacaactattaatatctatcttgggactgttatattaaacgcagagaatgatttgctacctgacggaactgttagtgttatttattcgggaagtgaatctgcaaatgaaaacgtggaaattaatctgctaaagattttcaatacatccggtattataaccggtgaatttgttgaggttactgcagatgaggtaagcgcattattttaaataagtaaaaaataaattaaatatattaaataaaattatggaggtaatatcatggcaacaaaaattttaggaatggaagcattaacaaagttagtagaaaagattaaaagtgtatccacagcgataccaaccaaactcagccagcttacaaacgacagcggctatcagacgagttcacaggtatctactacagttacgaatgcaacaaaggatttagcggcaaaaactgatgtaggaacattaacaaccttgacgacaacggcaaaaaataaccttgtggcagcgattaacgaaatagacgaacatcaggattcaactgcttcgatagtaggagggcaagcagagattattgatggattagatgcccgtattggtgcattgacagaccttaacacaaccgcaaaagggactttagttgcggcgattaatgaagttaaggcgagcgcagacgggaaaatgacatcgtctcaggttgattcaaaaattacggctgcaaaggtagggttagcaacagaaacatatgtaaacaacaaggtttcaagcgtatacaagtataaggggagtaaggatacatatgcgtcgcttccgacaacgggaaacacagttggagatgtatggaacgttgttgacaagaacggacaaaactttgcgtggacaggctcggcatgggacgctcttggcgagactatagatttaagcggatatatgaagaacgacgaactgcaggaaatcacggctgcagaagtagaggctttatttaactaaacctggagggatatagatggcgacaaagattttaggaatgacagcgctgacaaagttagtagataagacaaaaaagtatgtcaacgataaaaagctgataaatgtgatggagggtacaagcgcagagggcgcttactctgctgtcataggaggacaaggggcggtcccaggagtttgttctgtgtcattgggcggttattctaatgctgtaaatggtgagagggcagtagcaataggcggctggtctctgctctgcaacggatataacacggtatgcggtaaaaataatttagaaccaacagccggatattattctcataataacggcgacggatttatagttggaaacgggactttaagttcccgttccaacgcttttcgtgcagcgtacagcggtgatgtgtatgcgatgaagtcaataaacggaacaggagccgactatgcggagcttagagaatggtcagacggaaatcctgataatgaggacagatgcggactgtttgtatgctttgacggtgagaagatacggcttgcaaattcagaagacccaaaagacttactcggagttatatcaggaaatccgtgcatagttggaaacaactatgatgaccagtggagcggtaaatataagaaggatgtatttggccggttgctgactgagcatgtaatgtgggatgaagaaacagatgataatggcaatattataacacctgcaggtgagggagatgtgtatattctatcggaagactacgatccatcgcaaagttatataccaagaaaagaccgcccggaatggggatatatgggaacacacggagaactggttgttatagacgacggcacatgtaaagcacaaggccgatgcaagcctaatgacgaggcaaaagcaacggcggcggaagacggtttttatgtgcttgggcggatagatgataaccatattaaaatatttgtgagataggttgggggataatgacatggttttggacagcacaataatagttggggtgctatcattaataggtacgctcattggctcattatcagggatatttgcagcgaataagctcactacatataggataggacaacttgaagaaaaggtaaataaacataataatttaatagagagaatggtagccgttgaagcgtcagctaagtcagctcacaaacggcttgatgaactgagcgaggaggtgaaagagcatgagtaatgtaactacaggaacaatagcaagaaccatagtattaatattagcactagcaaatcaagtattggctatgtgcggtaagcaggtgcttaatattgcagacgatgatatatatcagacggtcagcctattatttacaattggtgcgtctgctgcagcatggtggaagaataatagttttacacaaaacgccataaatgcagataaatttttaaaaaaacaaaatgaaaaggagcaataaaatgacagaaaaaaatttttttaaactaataaaatcaacaatagttagttactataataaaaatgtaaacaaaactgacaacaaaataattacagaagatgatgtttatgtagtgtggagttgtaaaactctacaaaattataaagcattggcttccacgactgtgccagacggaatatattatgaaattacacacaacggaaataaaaacgaaacttattttgatgtgtatgaaagattggaaaattttgttgtccaacagattgaaagtgaggattaaaataatggcaaagatatacatagacccgggacataactgcagcggagcggatacgggagctgtaggatttgggttaaaagaacaagatgtgtctgtgcaaattggagtattacttagagatatgctgattaacagtggacaaactgtaaagatgagccgtgatagtattaccgatacggtatcaagcagtttaaacggcagtcttgcatacagatataatggtgccaatgactggaatgcagatatatttgtttcaatacactgtaatgcagcaaacacaaaagcgtatggctgtgagacatattattgcacaggcagcacacagggaagggcgttagcagaatgtgtacagccgcatatgacagcggaaacagaaagatataacaggggtgtcaaatctgctaattttgcggttataaaacacacgaacatgccagctatactggtagagactgcatttatagacaattatgacgacaacaggtttttagccagcgacgacggaaaatataaatgtgcagtgggaatttataaaggtatctgcaactattttggagtagattataaattggaaagcgaggacaaactgatgagcagagaatatgaagaattaaatgaaagattagaaaaagtggaaaattcaatgatttatgattatattgatgagaacatgcctgagtgggcggttcctacaataactaagctggttgacaagggtttgttaaaaggtgatgaagagggcaaactcggacttacttatgacttgatgagaatgttaataattaacgaccgcgcgggaatatatggggagtaatagaaagggcagaacaaataaatttgttacgcctttatttctttggcacgcactgacacaagattggttatataatgtactataataaatattttatagagtttaggatatattttacatatattgacatttattttaaaatattgtattatctagataaataatattttgttaatttggaggatatatgtatgagtaaaaatgtctctgtcggtttttattacttaaatttagctattacggctacttcgtctgatttgccagaaggtactattgagaattttatacctttttttgttgatgcaatgaataatttgtccaaccaaacattggtcaaaagaagaatagaatatccaaataaaaataagactctatggatggactcttttgaggtattggataacagaaattataatatgatctttaagtcacttaagtataattatagaagaaatgttcgtaataattcaactatggataatttaggaatactcaaaggtgaatttgatggtgatgaagaacgcactcatttatgtattagacataataaggggtgtaatacatttttatgtatgtttgaaaaaaattataacggtataggaataagtcaagttgtaaattatttatatcataaaatgaaagattttgcagatattagtaatcatgagtataggtatagtttttcgagtgattttattccggatgaagggtttttagctaaacttaatcttgcaaaaaaatttactcttttaaagttaactgttgaaagaaattctcttgatgataagtatttacaatttgctgatagagatgatatgtctgaatatgttgatattatttttaaacgaaagggaagaaaaagtccatatatatctaaagatgctataaagagatattataatcttattgataataacgagaatgaagtaaagagattatgtgtaaaatcaggtggagatacaattttagatacggaacaacttaagaaaaaagaaaaaattattgttgaaactacatctgatactaacgaggtagacagcgctgacttctttcaaaaggctcagcaattattagaacaattaaaattggaatgaggtgaaagtgttgaggtttaaagcatttgtaaaaaaaactatactattaccggtgtacgattattacaaatatatggacaaaatatgggtaggtatgttaatctcagggttaattgctttagtgcttactttgattgtaattctgtctagagataaaatatacttacctaagttgtttcaatcatttatagacattcaaataaattcaattgctatattgttatcattttcgatagctgttataactgttctagttacatcagacagtaataatataattcaacttagaaaagagaatgttgatacaaacaaatctaaaagaaatgatattgagataactctattcaatttattgatgataaatattacttacaatatagtagttgaagttttttattttttatttttaataatacaaatatttttacaatatctagtatgtgataatttaataataattttattggcgacaaatatatttttattatctcatattcttatcgttttgctagaatcagttagagaaatatatttagttttttggccaaataaataaacgggaaagtaagtaacaaaaaagatagggctttgacagaaagaaggtaggcactttttgtgtctaccttcttttaattttcataatttcacatcaaaatatttattataaaacaaaaatgtgagactagtctcatatatctttgtgatataaattgataaaatgtttgtatattttatcaaaaggtgtggaattatggaacctgttgacattttgaaagtgtgttttagtaatatactgtattttaaaagaaaagaattaaatctcagtcaaggaaagatggctgaaaaatgctgtatgtcattaagacaatatgcagatattgaaagcgggaagaggtttccatcttctattagcctgattaactttataataaatggcgggatagatataaataaatttatttctgatattcaaaagttaggttatgtgcctaaggacagggttacaaaggataaaaagtaaattattatttacacgattcttacacgtttttttagaaattagccaaaaatgacttgttgtaaaatcaatgaatttaattaaaaaacaacgtaataatgtaggttgtgtggggaaatgcgatagggtggtagagatataaaaacgatataattagttcctcttagccgcaccaaaatttggaaatccgaacattataccaattggtaataagttcggatttttgatttttttagttaattaaattttattatagttatttaaattttcatgttattatataacttatgggcaatttgtgacatcttttgtcaagaggtctttaacattatttgttttgatatagattattttttagctttgcgttttgatctgccaattaaaataatatcagcacgagaaaattatcatacttatatatctgtgtattgattagggagagtttacatatttaagattgcaaatttgcaaatttgctattcgtttgatataatataatcagctaataggggcctatatgtccttgttagaaatatcaggcgatcttattgtgcattggcagacaaacagaaagcggatatagtaattggcaggactgatagggacgcagcataacaattaagtcaaattgaaaacggaaaaatgtaaaacaccagcttcgatatccggataaggccggaaaaagggtttaggacataaacaaattatatattggggctaaccattattggccgccttaaaagttttgatatatataaatttggtttgtctgaaaatgtggttcaaaatttatgacatggacggttgatgtacatatcttgaaccgtttgccggaatacaaaagttttccacagcagtatagctgataagtgcttagttcaagtacatgacggatctgagaaatatagtgcgaaacgaggtcatggaactgacattgcctgcttcttgttcctgtgaaagacagtatagtgtaaagctgctctgaaattgttttttatgtaatatataatacaccaaatttgtgattttgtatggtaataagttttgggcagtaattttcataaagaactgtaactttattttggtatatttgaaaaacagctgtggagcaacattacggccaattgcttaaaaggaggattctaaatgaaccaatttattgaaacgttgacaagtaaagacaaatgtttggagttacccgaagaatatgattatttcggaaaacttatcggaagctggaaactcaattataccgaccgaaacatatcatgctcagttaaaggagaatggcatttttcatgggttcttgagggtatggcaatacaagatgttattgttttaccctcgcgcgatacaaaaactgaaattccgcatccactcaccgaatacggcacaacgcttcgtgtttacaatccaaatacacatgcttgggatattgcctattgttacacaggagaaattatacggctagaggcaagaaaacaagacgatatgatagtgctcacaaacattgatgataataagaaaaaatgggtttttgtcaagattgaggagaatacttttcattggcaaaatattaccataaaagaagatggcgaatggcatataaatgcggatatatatgctgagcgaataaagtaaatacaatataaaagaaacttttagacataaagataaagaatatcagaaaaaacatagtctgatacaaaattgtatcagactgtttgtattatttcttatataccgattaatttgactgtattacagagatataaaggtattaaacataaaatttgtcctaagtaataattacatattaaactttcacgggttttagatttatgaatttcgatttgcaaattctcaggttagagaaacacgtgtttttttcagcttaaatatgactttagactttagattttatattttcagagacaatattgacgaatgcagtatgttttgatgcagctgcgcatgacaactattttgtgttgggaaataaattcatatttagcagaaaaataagatttagatgatattaccatcgctgactctaagaattcggctgctgttttttgcggattccggcgaatgagtaaccataataattgtttgtccgatttctttattaatattatgcagtaattcaattcatgcctgctttattgttggattgctgtctgcatagataatatatttttcaaagtcctgtgtgaaagttatagcccaatcaccgcgtatatttttaccatttggagctgacatagtaataagtaatgcaaaaatacagcatacggcaatgagagttccaaaaagtgaaatgtaaaatattaaatatatatgaaaaatactgcggtaaccggattctttcatataatcagcccttttcttttatttataccccaagccttttaattgttacaagctgtttcggactttacggaatattctctattttttctcatgtatgacgtatatgcaccatgattgtattgtcacaaataatactgtattctccccatacttgttcatatagccgattcttgctaatgattttatcggcgttttccattaagtaggatagtaaaaagaattctctgtcggtcaagttaacttcttttcctgatttataaatacagctgctttctttatccaatgaaagacagccaacagttaactgtttgaggttattaggcgtatttaccgattgatattgttggcggcgaatttgtgacttaatgcggtaaatgatttcgcgcgaactaaaaagtttagtaatataatcgtctccgccgcaggagagaccgagtgttttgtctatatcatcatttcttactgataggaacagaatggaacaaaaagaaaattcacgtatctttttgcttacctcaataccgtctatatccggcagcataacatctaagacaataacatcgggctgatattctttacatattctgattgcgtctgtgcctgtatatgttttttatatttttgaaattgttttaatacagagctttttcaattaaacctacaatatacttttcatcatctataaataatattttattattcattacttataatgccctttttttcgttgagaggccgattattagaaaacttttctgtttctttggtattagctgcatgttacaagtttacaaaacgacagatatgcgtttgctatttatagtattttatgttcttgttgttttgctgatttgaggtaatatgaaacttttatagttttttagtttcgattatatgcgggcgcataaataaagtcaatagaaaatataaaaattatttatttagctggaatgtgattgacggttacaaaaaaatgtggtataataataaaaatagctattaattatggtttttgatgtaaagttgaatctaaaataatagcttgattttcattattgcagtgtttatatatatagtttttgaggtagttactgtatatcagcagtcaatactttgattttgctatattatttaagttcagtaatagcagttaaaatagcattttatttaatgtgcgggtgtagttcagtggcagaacaccagcttcccaagctggatatgagggttcgattcccttcacccgctccaaaaaagcggcaagcattaaatgcttgccgctttttattatgaaataaaacagagctatttgccattttaaatctcaagagattattatttttctcatacaaaccaaagtttttgtcctcttttccggcgaatgcttgttctgacaggttgttttcagccgctatactcatcataattttatcgttaaaatttaatatacagtgctgcaggatcccgctaaatgccttgtatataaaagtatctgcaatatattgtttcacaccttttctaatactaaataataatttttcgagtttttattcatcaaaggtgcggtcacgaaaatctaatttttgcccgttaaatgtatattttcaatatgttcaacaacaaatgccacttgttactatctcgctattattacattgcccaaatactttatagtaaacgcaccgtcaaaattaaacagcttaattattttcctcaattgcttctccgaaaagttttcattttacagttgattacttaaagtgttttctctatatcatcgtgtttccgcaagtcatttacctttatatttcttttaatcaaaggaattaattttaaaagccataacaatataatcaccccattttgttttatacaaggggtgattatattgtatatacattaaaatcaaagaaatatataattactcaattgttttaatgattatttctctataagagtaaatttccatttacagcagcaggattcgtctgtaatatcaggataacagctgatgcagtcacagacaattcttttatcaataattttggcaaactctgaatactcaattattcctacagatttacatggatggtaaggcatattttttcttaatcttgcagtttgaaccctgcattctaaagtgctgtatatcaaagtattgtcttttattataagttcatcccggtttatattggcataaaatctaagctttaatgctttttccaagccttgcagaccagggtattcttcaagattaagaaattctttgatacgttttgcttcaattgctgtaaaatacgtccacacttcttcatcacggcacatggcttcctgcataccatatttattctcaagtgattgaaaccataatccatccatagccagccaatttttttaataagcttcaatcaaagttattagttcattttttgataatttttgcagtgtttctttatttaccatgagccgctcctttaatatcttgttttagaatataccaagcaaatgctgcattaacaaactaacagcaccaatcgctatccaacagcataaaccaagaaatattggctttcctcctgattttacaagcttgactatatccgtgttaagccctatagccgacatagccataacaataaagaatttgcttagagtttttaaaaagcaaaatactgcttgtcctccgtcatgaatcgttccggatggaaagattgcaaagaaaatggtggttatgacagaagctaagacaaaatagaggatgaagaatgggaaaatcttttttatgctgacctttgttccgccggccgacttttccttttccgttctccaaaaggcaagcaccaaagtgattggtattatagcaagagttcgggtcagttttactattgttgctgtgtctaaggtgttgctgccgtgtataccgtcccatgctgtcgctgccgcagttactgatgaggtatcgttaactgcggttcctgcaaacaatccaaatccctcattagacaacccaagcatggaacccagtgttgggaaaatcaatgcggctatgatattaaataaaaatataaccgagattgactgcgctatctcctcatcgtttgcgccgataacaggagcagtggcggcgattgcagaaccgccgcatattgatgaacccacacctattaaggttgcaattttgggatgtaattttaaagccttatataaaacaaaagatacgattagcgatattgaaatagttgataaaataatcggcaatgactgagctccggtttttgctatacttccaaggttcataccaaaacccaataaaattactgcgtattgaagtatgctttttgatgtaaatgtgattcctgattgggactttgttttattcttataaaatatagttactaccatacctgctattattgcaaacacaggtccgcccacaatcggaaatattaatccaagtatgtatgcagggattgcaattaccaaacaaattaaaattccaagccagttttctttaacaaaattcaagtttactcccccttaatttagtgtttattctattgcagcagatttatcatattctttaaattgcctttgcttttcaaatacctcaggcagttttttgacctttataaaatatgaaatcataaacagcgtgcaggcggacagccaagctatcggcccggatgcgcagactcccaaatatccataaaattctccaaacatacctgttagtgtgttcgccagcacgagtgaaagaacaattcgggcaataagctcaaccgcgcttccgcacagaactattccggaattccccattccctgaagactgttgcggtatacaaataagagaccgagagcaaaataaaacacacctgctacataaaaatagttttgagtatataatgtcacgctttcacgcaaatctccgctggttcctgaatcaatgaatattcctgcgatttgtcttgaaaagattaaaacaagagccacaattataactgtgaatcccaaaacaagcaaagcgcatttattgactccttcgcgtattcttttttcacgcatagctccgtaattttgtcctacaaacgttgccattgtaaccccgaaagaaatttggggctgactgacgagctgctcaattttattagctgctgtatagccggcaataactgttgagccgaatgagtttaaaacagcttgaacaatcattacgccgatagcagtaacggacatttgaaatgccattggcactgcaagccctagatgtctgagagaaaattttgagtcccacttaaaatcgctttttttgaggtgcagctccgggaactttttgccgacgtatagaagacaaagaagcccggaaatagcttgagctataatggttgcaagaccggctccggcaactcccatatgaaagtttaatataaatactaaatcaagaattatattaataatcgaagagattaaaagaaaatacagcggtgttctgctgtctcctaaagcacggataacacaggatatgtagttgtaaaagacttgaaatacgattccggcgtatattacaataatataattatacgaatcgtttataatattatccggtgtgtgcataaactgcagaagcgaccttgccgaaagcatactgactgctgttaagaccacagaagccatcgctgccaaaatgagacctgtgccaacgcttcggcgtactccgtccatgtcattggctccaaatctttgagctactataatagaaagaccatttgtaaaaccaagtgcaaaacccacaattaagaatgtaatcgcaccggctgcgccaactgccgcaagggcttcaacactgatagtccgcccaactataatggtgtcaaccatgttgtaaagaacttgaaagatgttcccgataagcagcggtatggtaaatttaataatgtgtttgataggacttccgacagtcatatcgtttgttaaagcatttgccatttatttcattccccctcaatataatataattttcaaacatatgtcttattaatataacgctacgaattttgtatgtcaactataaaactgtacaaagtttctataagtacaaatttaaaatattattgaataaaaagaccgtaataaaagaaagagaatatttaatttatcaagtattttaaagtggaaaaatgttgttaatatcattttaaacaatttaaattttctgtaaatattcggattatgaagttgttgatatagctgtttttgtaataaaaattttatgcgcttgccggcattttattcactgctgatgtatccaatataattaaatataaatatgcaccgccaaaagtaacttgcttttggggtgcatattaaaatattatgtttaatttttaatttaaaaatttattcttataggcctgtctccgagagtgagcacatcattatttttgatttcgacctgatgtttaagaggcttgccgtttaaaagagtaccgttggtggagttgttgtcttcagccataatcttctttccgtcgcgaatcagtatacagtgtaccgaggaaaccataggcttattaactactacatcacactgaggatttctgcctactaatatttcatcttctatagtcagagtttttgttttattgttttcaataatagttacgcttacttttatttcgcctttatttttatcagtgtttgaagatttattgtcacttttttctataggctcagaagttttgggttcagaacctttttcacttttactttcttcattatcattaatattatcttcttcgtcaacagcgtcttcgctttcagtgtcagagttgttatcttcttcagcgtcttcaacatcttcaacatcattttcttcaagttcaggggtgtttaagtgtctgctcgattccatatttttgtaatatagaatttcatcaagttcatcagtttgttttttcttaggattcataaataatcctaagcagattagaaccatagcgataacaaaaagcgcgccggcgatgagtaatatgtcattaagtatattcatatggcagttctcctttaaaatattatcgtgatagcgctgtagctatcttccggctcattttttttcacaattctaatcatctttctgagccattcagaggaagatttcgaacgttttaaggttttctcaacctggcgctcagtaatcttttcccaaaacccatcggtgcaaatcaaaaccgcgtcgccgcttctgacggcgattgggtcaattgtttcagctccgcacatcgggtcggcacccaaataagcggtaagcttgcgcctttcagaacttttacgaattcccggaaaacgaaattcacctttactatgggctaaataagctaaagaatgatccggagttatatattgaagataattttcactgagataatacattcggcagtttccgagatgaccgcttatcacacaattcccatcggttagcacaacggcggcggaggcttcataagtcttttcttcaccattgtttttagacgtgtgcgtaagttcccaaagtttttcatctgcgtttttaaaataaccggagatagtatcccgggttatatcggaagtatttttaaaatcagataaaacggaatcaattacaagttcagaaaccttgtccccgtttaaaccgcttaaagacccgtcacatacagcaaaacaaccgcagcccctgtcttcaagcattccgatataatcacagtttatttccatatcgcccgaatatcgagcggatgaaatatccataaatcattctcctatctttataatgactgtataagctaatatttattaatataatattttattagcaaaataaaccagtcaatcaaaaacaacatattctcattatactttatattggatatattgtcaacacaaaatgcggtggtctaagccatattattgttcagattgaataacaaattaagacaaaaaaagaccggctgaagtccggtcttttttatattctaaattaaggctccgcgtatcatagcagtgaattaatttttttataagttttattcttcaactaactcaacaatttcaacattgtcaacgttagaaatcggcggtatacttcttgtttctattgcacttctgttgccctttaccttagagcctactgttaaatcagcaagcttgtagattcttttgtcattgccgcgggttataacggtgtcgtcatataccataagggcacgctcgattccgttgtcatctataattatgcggtcttcctcaacagctgttatagtaccttcatatggtacagaatcgattacatcgggagtatcttcaccgttaacctctccggatctctcggttccgacagtttcaatagaaatagcggttgtctgaggcggaaggctaagagtcattgcggcgccgtagcctattttgagctcctgtccgtcaacaagtgtgttaaggtcaagttccttatcgccgtcttttaaaattgtatcttcgcttactctgactattacttcacccaatcttgcatcctgaacagacagaacgctgttttcatcttcacctttttcaatagagtttaaggtaacgtcagcaggttcaacaactataacatagtcgtctccgccttcgtatacatctacgcctacgaggtcggttaagaattcaacaggtacataagttgtttcaccgtcaaccaatgaaggagctattccgaaagaaacaggcatcatttttgagaaataataagagtcaagccctatattcattccaaactcctgagcgcctcttaaacactggattttctggtcttcttcattccaaacaacttcaaagtttaagaactccatgacatatctgagcggaaccattttgtgtccgtcaacgtttacaaccggaacagcaggaatggtagctccgttgtatgtaacttctgactcagaaccgttgttaaccgcttcaccgtcagttgctgaagtagttgtatagtcaaggttagggtcggctgttttttcaggataatattccgcaaacacagcagtgccgcttgcaagaactccggcagcaactaatgtagaaataatcttttttgtatctaacttataatttttcataatatcctcctaatcaatttacttaatgttttgtttacagtaccttagacgaaagatttttataaaagttacagatttttataaattatttgtaattcgtaatatttaccaaaaaacacatgttatatataggaaataagtatattttaagcataaaaatacctgtgcaaattacagcacaggtattaaaaagtaggttaagtagattattatattaatattggctgaagctgaattcccttttgcgctgcctcaaccgattttggtatcagcttaaagtcggaaaccagcgagttttctttttctgagtaattatcctgtccgaatgggactatataaatattttttcttgaaagaagtgttcctatgtttcttgcgctgccgctgagaccatcatttgtggaaacagccacaactatcggtttgttatttctaagatgggactttgctgctaaacacactgcagtgtcggatatcccgtttgctaatttggatatggaattccccgtgcatggggcaatcacaaggacgtctataagttttttaggtcctatgggttcaacgtctgttagtgcggtcataggttttttgccggaaatatcatggaccgcatcgtatatttcctttgctgttccaaacctcgtgtctgtatttgcgactgccggtgacaggatcggataaatatccgcgcccatatcagcaagctcagccataacggcaagcaccttttttatcgtgcaaaatgatccggttaaaccaaaccctattttgacgccttttatcgtttcgtccatataattcatcacctcgcttgctcatttaaaatattattaattgtgtcgcggattatgtttcctgccgtgagcggagcggtttttcccggcagcgataacgcccatattacatttctgcccaatcgttttgctgactcaaagtccacaccgccgggtttgcttgccaaatcaattatcagacagtcttcacggagttgtcttaacatacttccgttgattatcattttaggtactgtattaaaaactacatcgtattttcttgggtcagtgagaggcttagttatgtccgcgccgttatatccataggcttttatatatgctaaatcactctgtttcctaaccgccacagtaacatttgttcccagtccgcttagggtatgacataaaatctttcctacgcggccaaatcctgtgcataaacagttagaaccatgcagagtgacaggcagttcttccattgcgattttaacagcgccttcggctgttggtatggcgtttaagacggcaagttcctcacgtttcatatagtccacaacaccagcgccgtttagatgggacaaagctgtaagcctctcgtcaactttcccagctaaaatcagtttcttatccaaaaggatagggggctcgaatagatcactgatttttatttttgtttctgataaaggagtattaatattctcgttatctaatattgatgaatatggaaccggaagtacaataaagtcagcattgtttacggcctgtgccaggtcgttgcagacagtaatattctttttgcctaaaagttcatcactgtctatcccgataacatttactgaatatccgtcttttgcaaatccaagtataacgtaaatctgccgtctgtcgccgccgataaatgcgaaagtagaatacttgctcatcttcaacacctcaatgtatattatgttggtatatgaatttggtgaagatatttataatcaaagttttatttaaaaaatttcaaatttttatattttaaataaacacatagtataatataattaggaagtaaaataataagaaataaaaaatgaaataaaaaaacggccgagatgtggtggatctcggccgggagtgtttctgcttgaactaacctcaagcagagggaaatgaaaaaaagattgtttagttgtggtatgggtatatattacagtatttgtgtgatttttgcaatagagaaatttgttgatattgcttaaaaagataactgtgtttttgttaatatttaacaattatatacttttatacattgttaaaaccaaaagtatatgtaattaaaataagttttatacacaaaatacacttatatatttaattttttctatattcataatagttaaacgtctggttttgtgctcttttatagaaagataatctgctccaacgtctgaaagcactccgcatttttcaaatttgctgccggtttggttccaaaatgctacgcaaacatttttgccgcagaagttttgaaggtattgttttaaaacggttgatgagttgttagaattctgaggaacactaaagattttctcagtgccgctcagcccgtttgttctaataatagcgtcataaaccgtcttttcttcgccctctgcgtccggcggaagaatcagatcatcatagttgcgcgaatcaatgtttatatttaaaggttccatgttatgtttgtttctgcctgaacggcggttatttataggttgtttcaattaccattcctcctatcttagtaatagtctattcagaaaaaataaaaagtttacaaaaatatgaataacatttatatttttgcaaagaatagatttgcaaaacaaaattttaaaattttataggaggtttgacaatgtcaagcaaaagtaataaccaaaataataaccagaacaacaatcagaacaacaatcagaacaacaatcagaaacagaaccaaaataacaaccagaaccagcagtctagcagacagaacaacaatcagaacaattcaaattctaataactaattgcagaaaagcatatttaggggcaacaggtattgttgccccattttttcatttattacttcttgtatttgtgtcctgttccgagaataataactaagggaattgggttaaagacaaggaggtagataatattgcctttattaagcagaaaaagggttggatttatcatcactgttttttttgtttttttggtatttttcgggatttccgcagaggcggaggaagacggaaatgctgcggcagaaaaatttgttgttccgggcggacaaagcgttggggtttctttggacctcagcggggtctatgtagacgggctgggtgatgttgagaccgagggcggcgccagcgcctctccggcaaagtcggccgggatagtgtcgggggatataatcacagctataaatgacgaccctgtaaaaactgttgacgacttcaggaaaaaactgaacacacttgaagatactgaagaggttaaggtcacattaaaaacaagccagggaacagaagagactaaaagcgttgttcctgttagagcgtcagaagacggttctatgaaaataggcgtttgggttaaagacgcggcttcaggtgtaggaaccataacctactatgacccgcagacaaaggaatttgccgctgtcggtcatagcattagcaacgttaacgccggtattgcttcaggtgaaataacaggagatatttttaagtccgaaatagtaggcgtgagacggggagaatcaggaaccccgggcgagcttattggagtttattcagaaaataagcttaaaataggagccattagccaaagcaacgaatttggaatcgtgggaaccgtttcaaatcccgaaaatctgaactctatgcgccagcctattccgataggcggcagggactcagtttctttgggtgaagcgattatatgttctaacgttgaaggaacaaaaatccaagaatttactattgaaatagtagagattaatcagaacagcgattgcggcaaagatattgtttttaaagttacagacgaaagcttaattcaaaaaaccggaggtatagttcggggaatgagcggaagcccgataatacaaaacgacaaaataatcggttctgtgacacatgtcttggtcaacgagccgacaatgggctacggaatttttattgaaaatatgcaaaaataatttaaaaagggtgattttttcacccttttttacagaattgccaatttttggcggttattttgtcgaatgggttgacaacaaaagggaaattcactataatttgaatatcgaatgttaccaaattatggcaaaagtgttacaaagaaattacgacagcgtttttcgacacttttgtctatggtaaatatttataaaaatttataaaaatttaatcacatagggagaaaagaaatggaaattaatcaaaaaatcaaagtagcagtagcagatttcgacagggagttcgcagacggattgtgcgagtatatgagacagactacaaaaattgacgtggtgggttgtgcgtatgacgggttggaagttccgggtttggtaaagaataatgacgtagatgttttggtaatggatttggtgctgccgaccatagacggaataggagttcttgagagaatcaacagaatgcagctgaataaacgtcctcatgttctgatagtaagctcagtcttgaacgagactgtaacgtcatattccaattcatacggcgttgagtattgtatgttgaagcctgtcaactatgatgcgctgattgacagaatcacaatgatggcggctccgataaccacaggcgaagatgtaatgcagaactggaaggtgaacacaaaaaagtttgactatgcacaggtagaagcaatggtgacaaacgttatacatgagataggcataccggcgcatataaagggataccaatacataagaagggcaataatgatggcgatatatgatttggacataatgaactctgtaaccaaagaattatatccaaccatagcggagaacttcagcacgacgtcgagcagagttgaaagagcaataagacatgcgatagagctggcgtgggacagaggtgacatggacaccttgaacaacgtgttcggttacacggtatcacaaataaaaggaaagccgacaaattcagaatttatagcaatgatagcagacaaattaagacttcagcttaagaatgcttcttaagattttataattaattttttaattttactaagaataataggtacaaaaaatgacctgaaataaaatacaaaaattttgtattttatttttcggtcattttatattgccgcttttactgtgtagtattacgaatttgatttaatcgtcttccccaaagggcaagacgatctcgcccgggctcggcgggcgaaacagggcctggcgcaacaaagtaagcaattatagattaattaaccggatgtgagtaaaaatgatatttacaaatattataatatacccgcgactgcgcgcctaacgaggaggactttgtcctccctaccgatgcttactaaacagcaattttttattataaatcttattatataggtattgcggatttgttttaatcgtcttccccaaagggcaagacgatctcgcccgggctcggcgggcgaaacagggcctggcacaacaaagtaagcaattataaattaattaagccgacttaagttaaaatgatatttaaaaatattacatataaccgcgactgcgcgcctaacgaggaggactttctcctccctaccgatgcttgctaagcagcttctagttttgtgatttaacctaaaacttttttgccatacgtcagattttaatatatttatacaatttccccttttctcagctttgtataaaatacttttatataagtcggcaaattattatactcattattaatgtttgtaatctgctgatatgtaatattatggcttttaagcaaattttcaaaatccgctttatcctgttttactttcttttctatttttttgtttaacgcagcattatatcctttaagctctgacatcaaatcatatacagttttatcctcatcaatctttatacagaaattttctgtatcttcaaaagttttaaactgatataacagtatcgaatgcagttttgtatgtctgtatctgtcccgtatgtatatactgaatggattctctgatacatcgtagccataccagctatggtcttttacaatgcagatagaatactccttccgttttataaagtcgttttttgccaagtagtcgtgggcaatcatgtttacataatccattttttctctccttatatatttgtttccggtctccgcagctaagatatagttttggagccggtttttaatttttttgcgtggttattgagatattggttccgttgctttccataataatatcgccgtttaaatctgttcgaaaaacttctgaaccctcgtctgacagacggctcagaacagcttctgacgggtgaccgtagctgtttttctttcccactgatataaccgaatattttggcattacctcacgcaggaatacatacgacgttgaagtttcagaaccgtggtgacccactttcagaacatcggctctgagattacagccctgttctataatattttgctcctcttcgcgctcagcgtccccggtgaatagaaatgatgtgttgccgaatgtaactttacagataatagaagtattattcatattgcttgagcctaatcctgcagggacaaagaattctactgtacagccgccgaatgaaattgtatccccggattggggattaattatttccaatccctgttcggcggccttagttttaaagttattatatgctttgctggtgctttcttttttgtgggcaaagacgtttttgacttccatagtggagagaggggcggatagaccgccgacgtggtcctcatgggcgtgggagcaaatcatataatctattgaagttacgtttagctttttaagataagagaataacagactgctgtcggcggcgttaccgccgtcaataagcatagactctcctccgcagaggagaagtgcgcagtccgcctgaccgacatcgataaaatgcacggataatttatccgatgaatcaacagacaaattatctgcataaaaagaagctgcaggcgttggctcagataattcaggccggataaattctgagttttggcaacagctggttattaagaatatagataataaaatactaattaataaagaatattttttcatagatatatccgcaaaagtaagtgaaaaataaaagtatttataaaatataaatatatggaatattaggatacagaactatgtaatatttcttatagacatatttactaacgattttatagtaaatggagttgtctcgcttagttttgcgagaccttttacattactgactgctatattaaaattatgtgatggatttttcatattagaggaagtataaatttttaaatcatttgttctaattaattctgatatgcaaaaatttaaaatatcagaaacagaagcatcataagttaaagaagcttcttctaaaaagttatataaatcatcctcaatttcataagttttgcgtattcttttttctcttttagagaatttattatttaaaaatttattattcatcttttgctacacccctcatatgacccaatattacaatattttcaaaattaatttaactaccgtcaatacaataatatataagaaatatttctacatatcagaatgtatattatgaataatttactagataaattttacacagtagttatgtaaattttgtttactaatgttgttatataatgtcaatctcataatattatttgaaaatattaagcaacattaatatataataaaattaagtaatatgttgaccacaatattggtcaaaataaaaaagttatatagcaagcatcggtagggcagacgtagtctgccacgtaaggcgcgcagtcgtggaaataaataatataataaatatcatttcagcaaaatacatttaattaatcttataattacttactttgttgcgccagacccagtttcgcccgccgagcccgggcgagatcgtcctcccctccggggaagccgattgttgagctacaacattataaatgtgacattggcagaacaacgtatgaaaaatatgagaacggagagttgaatattcgcattagtgtgttggttgctttgcgagagatatatgattgtaaatatgatgatttttttgaagggctagtagccgaaagaattgatagttagttttttatatatttcataacaaaaaaacggattatatagcaagcatcggtagggcgtacggaggacgccacgtaaggcgcgcagtcgtggaaataaataatatcttaaatatcattttagcaaaaaattattaaattaatctgtaattacttactttgctgagccaggcccagtttcgcccgccgagcccgggcgagatcgtcgtcccctccggggaagccgattgttgagctacaacattataaatgtgacattggcaggacaacatatgaaaaatatgaaaacggagagttaaatattcgtattagtgtgttggttgctttgcgagagatatatgattgcaaatatgatgatttttttgaggggctagtagccgaaagaatagatagttaatattttagagtaatactagattgataatgcttttatatacttcataataaaaagcggattgtttagcaagcatcggtagggcagatgaaatctgccacgtaaggcgcgcagtcacggaaatatgtaatattacatatttcatttcagccaaaatatatttaattaaacttataattacttactttgttgcgccagacccagtttcgcccgccgagcccgggcgagatcgtcgtcccctccggggaagccgattaagaaaaaaacataaaagattaaaaaatgaccttgacatttagaaaaaaaatgatataataaaaacagataaaaggtaaccgttaaacggtcagcccaaaattgagatattaaagtaaccgcaatccttgggggagggcggttacttttttattgattcaatgagagttatgaaaacaatcataaaaataattatgtaaacatactccatataaatcaccccctttctatcactaagtaagtgatatagggaggctaaccgtccttcaattttcttttatcttcaatcagcaagcttgcttgcgggttcaaagctgcctctgagcctgtcgaagagagcttcctttaaattgctaaatataatattatatttgatttatcgaataaagtcaaattataagttttttacataaaacatataatatataaaaatgaccttgacaatttataaaaaaatgatataataaaaacagataaaaggtaaccgttaaacggttagccaggaatatagttaaaaagtaactgctattctagctaagagggcggttacttttttattgattcaatgagagttatgaaaacaatcataaaaataattatgtaaacatactccatacaaatcaccccctttctatcactgagtaagtgatatagggaggctaaccgtcctacaatttccttttacctgcttctataatattatatttgatttatcgaataaagtcaaattaaaagttttttacataaagacatataatagataaaaatgaccttgacatttatgaaaaaaatgatataataaaagcagataaaaggcaaccgttaaacggttagcccaaagttttggttttagtaaccgcgttccttggggtaagggcggttacttttttattgattcaatgagagtaatgaaaacaatcataaaaataattatgtaaacatactccatataaatcaccccctttctatcactaagtaagtgatatagggaggctaaccgtcctacaatttccttttacctgctagatataattatatatgcaatatcgaataaagtcaaattaaaagttttttacataaaagcatataatagatgaaaaatgaccttgacaactttaaaaaaatgatataataaaagcaggtaagaggtaaccgctaaacggttagccgaaaattggggttttaaagtaaccgcgttccttggggtaagggcggttacttttttattgattcaataagagtgatgaaaataatcataaaaataattatgtacatataatccatgtgaatcatcttctttctgtcattaaataaatgacagcagaggctaaccatttttaattttcttttatctttattcagcaagcttgcttgcagtttaaagctgtctttgaataatattaaatgaaattttaaatatatatttaactatttaaacttctcacctcgctgctgcgcagcattcggttcctatgttttgcccgaactttgggcggctttccatttcggaaagccgcttttttatatgaaaattaatgttttttaaattaatcaattcttttacactttcgtcataattttttcatatcttccgtatataatgttaaacatagcaaggagatagaaaacttgtttattttcaaatagttaaattttttatatattatataggaggtatcagtatggacgagttcaaaaaagagtttgatatgacttcaggcgacggagcagaaaattccggaacagaaaaatccggagcagaaaattctgtgaccgaaaataataatgataattcaaagagtgagcaaacggcggcgtttgaaatgaacgaagcctcaactactcaggaaaatataccaagtcaggcggaagctaaaatagaaatcagtgataagacagaaaatacagcttcttcaactgaaacagcatcgtatagttacagcggttcggctttgggcggcaacgcacgtgaatcttttaatcaaaacagccagtattcgggaacaaattaccagaaccaaaacagtcagagccaatcggcaaacacctcatataacacccagggttcaacttcttatcaaagcggaccttacagcaatcaggcttataataacggatttaatgccgcatacaagtcaaacgggaacggaaaccccggagttccgtataatgaacatataaacaagaaaaaaaccgataagaaatcagtcagatatgttgcggcgcttttggcggcggcggttctcaatttagcagttttgggcggcgcgtttgctctcggtcactcgtttggttcaaagagcggaacggcgacaaacaaaaccactttatcagaacagcttaaaaccgacgacggacagtctagcggaggaagcacaggcggagccacaagcaccgcttcaaccacaggaagcaaagacacaacagagatagcaaaggaagtcggcccggctgttgtcggaataaagagcacggttcagggtcagatgagtttgttcggcggatacagcacatcagaagcacaggggtcaggcataattatcagcgccgatggatatattgtaacaaataaccatgttgttgctgattcaagttctgtatctgttcagctcaacaccggttctgaatatgcggcaaaggttatcggcgcggatgaccaaaccgaccttgcagttataaaaatagatccgacagaagaactcacagtagcgaacctcggcgactctacaaaagtagaggtaggagagacggctatcgcaataggtaacccaatgggtcttgagttctttggaagcgtaacacagggaattgtcagcgcggttaacagaactgttcaggttgacaacagaacaatgaatcttattcagaccgacgctgctattaattcaggaaattcaggcggagcgcttgttaattccaaaggcgaggttataggcatcaacgcggttaaagtaacaactaccggtgtagagggtatgggatttgctatcccgatttcagaggcaaagcctattatatccgaccttcttgattacggttatgttaagggaagaccggttataggattgtcaacacgtgacgtatcggcgtatatggctcagcagtatggatggcctcagggcgcgcagattatgtctgtaacaacggataatgcaagaaacgcaggattacagcagggtgatattatcaccaagatagatgataagaccatatctaaaggctcagacctaactgagtataaagatacaaagtcacctggagatacggttaagctggaagtttataagtatgctacgggcaagactgagtctgtctcagtagttttgagcgaacagattcctgactaatatactgttatcaaattcggttaacggagaaatcgtaatccgattatatatacggcaggatggtgcggcggaagcggcgccgtttctgccgtatacttgtctgttaagtgaattatgtagtattgtatataaaagatagattgtcaaatagattattggacataattgtttattgattttaatgcaaactgagtgtataatggtatttgaattgaataagaataaaaaatttttttgaaagcaggatgtttatatggtcaatgctgataacaatctttacaatgagtttttggaaattgttgaggatttgatttatacacccgagtttagaaaattagacgagtgcagtcatcattacggcgtgagcaggatgcagcactgtataaatgtagcatattatagttttgttgtttgcaagaagttaaagcttgattacgttgccgctgccagggcaggattgcttcatgatttgttttactacgattggcaggggtcagggctaggagttgcaaagcatgcgtttctgcactccagtatcgctcttgaaaatgctgagcagttaacagagttatcaccgcttgaacgtgatataattaaaaatcacatgtggctgtgcggcaagatgtggccccgtcacagagagagttatattgtttcggtagctgacaaggtttgcgcagtatgggaagccggatatggagttaagtgcaaggtagcctgcgttatggctgagtaaggaatatggttaaggaagatttaaatcaaaagagacatgaaattcagaaagaagaacttgagatttataacttaaatgaaaagatagttgataaaatgtcgggctcggattctgaaaaagttaaaaagaaatttttggtttaccaaatattattttgtctgatggcaattttcagctttttgatattaataaatcagtttcttggaaatataagttacataaagcagcccgtgtggctgataattgaagcggctttatggctgatttttctcgctgattatattgttcggctggcggtttccgatgacaaaaagcagttttttacacggaatatattagattttttggctgttctgcctttgcccggatttagagtttttaggatttttactctgttcaggatgatgtttgccgtgaaaagggtgcttagagcagtacacatagttatgaattccaacggatttttatatcttttgggggcagttgcggtatggatgctgataggctccgcatttttgtatcattttgaaaacgggataacgatgaattcatactttgacgcgttatggtgcagtattgtgacggtatgtactgtcggatacggcgacgtggcgcccataactgcaggaggaagagttgttgcagtgctgttgatgatgacaggtattggaagtataggaatggtgactagcaacataacagcatattttgttgtcagggcaaagaagcgccgtgtagtgattgacaaaaatcaaattttggatttaagcatggtatcaaaggaaaaatatgaaaagattgccgattacgcaaaatatgttctgcagcaggataataaagatatagattagaaaaatataaaattaagttatgagaggagaaaaacttatgaaaaagttaatggcaatagtgctgacaggagttttggcagtgagcgttttggcagcctgcggaaataaggataatgctgaaccaaccaaagcgcctgtatcaaactctgcaaaatctgaagaggataaggcaactgcaaagcccgacactgataagaaaacagattcagacaaggacagcagttcggaggagggaaatacttccggtgacaaagatgatgttaaggcaaaagccggagacaaagaagatgcggacgcaacagccccctctaaacttcagacagcagatgaagccgctaacgacactactactattgacaaagagatagaggatattgaacagctgattattgacggaaactatgacgacgcgttaatgcagattaaggctcttaacacaaaaaatctaactgacgcggaaaaagagaaagttaaggagtattacgagaaaatagaagattatatttcaaacggacttactgactagcaataatcaattgggctataaagaattatagtccagtcgtaatatagaataataaaccataaaaagaccattgtattagactataacaagcttcttacaatggtttttttgtaaggatttttatagcgccattttaattataaacacaattggatttctataaaaagaataaaaaatttaaaacattaagtttaagatttaggtagaaatttttatttaaattttaaaatagtttttggttgtaactttttattactagaacttttttaggtttttgtaataagaatatgtgaatgctgcaataaattggatagaaattttaaagtcataatatgataaaaaatattcaaattatataaaaatgcggttttgcaagcgtaggtaggtgcaactgtacccccgccttacaggagtgtgttatacaaactgccttgttttcattaactgaaaagtcaataaaagactagacaaaaatttataggtgtttcttggtgaacatcggcagggtatgcgtaagcacacctcgttaggtgagctgtcatctcacgcgtagcgtgaacatacttataacaagtttgtcgtaatcctttttaataataaattttaaaatttatattcaatttattgcagactatccaaacatgattggatttctgaaaaaggaaagaaaatttataacactggatttcagatttaagcaagatatttagtttattatgttttaaatagaaattgttgggtatactctgattgtaaattgaagtattaatagttatatttattctgtaaataaaataaattcataacaaaaattcagctgaaatatttctatttggctaattaagactaaagaaagaatgtatatgtataataagtatatcatacgtatgtataattaaaaatttgtaactaaatttagcgtaaaatagaatatatttaaattattaagtgatagtattttttgtcgaaattgattttttgggaaatttataaaattttccttgacaagtaacaatggttgtgatacaatctgtacataggtcatgattctcatcctgtgaatcaatgacagaaattttaggaggtattgtaatatgacaggaaaagtaaaatggtttaatgcagaaaaaggattcggtttcatcgaaggcgaagacggaaaggacgtattcgttcatttctctgctataactatggatggttacaaaacacttgatgaaggtgttgcagttgagtttgacgttatcgaaggtgctaaaggtccgcaggctgttgacgtaaagcttgcgtagtcttttaatatattttgattgactgaaagattaactaagaaattatagctgctcctgccggggcggctattttttaagatttaaaacaaatgataaagtaaaataaattatagttggaggaatacttatggacaagctgattaaagcgattactaaagatggctttctaagagtatacgcggttgaaactactgaaactgttaacacagctcaaaaatttcacacgctttccccggtctgctgtgccgctcttggcaggctgatgactgccgtgctgatgatgggcgccatgcttaaaggcaaagaaccgtcgctgaccctgcaggttaaaggtgacggcccaatcggaatgatggcgtctgtatctgattctatgggtaatgtgaaaggttactgtgctaacccggttgttgatattcctttgagagaggacggaaagctggatgttggagctgctgtcggtcaggggatgcttggggttataaaggatctcaaaatgagggagccgtatattggtcaggttcctctccaaaccggagaaattggggacgatattgctttttattatatgcagtcggagcagactccgagcgttgttgctcttggggtgcttgtggatcgtgattattccgtaaagtgcgccggagggtatattattcaggtgatgccggaatgtgacgacgcgacgcttacaaaacttgaaaattctattcaggggcttatgtctgtaaccgaaatgctggataagggtatgagcgtcgaagaaatgctgaaatatgttatgcttgggtttgatattgagatattggaaaccatggatgttgggtataagtgcgactgttcaaaagagagaatggaaagggcgattatttctttgggcaaaggtcagattcagagtataattgatgagaccggcgaggctgaaatatgctgtcatttctgcgatagacggtacacattcggagaagaggatttgaaaaaatttcttgaaacggctaaataaatataccttaaatcatttgacaatgaaaaatccttgtgctataatttacctattaatatatgtgaatatatttgcaaatataattttaggaggtttttgaaatgggtatttcagagaagtttacattaaaagataaagttgctctggttacaggcgcttcttatggtattggctatgctattgccagcggatttgccgatatgggcgctaagattgttttctgtgatattaagcaggagttcgtggacaagggtctcgctgcatatagtgccgacgggattgacgctaagggttacgtttgcgacgtaactgacgaagctgctgttcaggaaatggtaaagaaaattgaagcagaagttggcgttattgatattcttgttaataatgctggtataatcaaacgtatccctatgtgcgatatgacagctgaggagttcagacaggttattgatgttgaccttaacgctcctttcattgtgtcaaaggctgttattccaagcatgattaaaaagggtgccggtaagattatcaatatctgttctatgatgagtgagctcggccgtgaaactgtatcagcttatgctgctgctaagggcggacttaagatgcttaccagaaacatttgttcagagtacggcgagtacaatatccagtgtaatggtattgggcccggatatattgctacacctcagactgctccgcttagagagaagcagccggacggttcaagacatccgtttgaccaattcattatctctaagacgcctgctgctcgttggggaaatcctgaagaccttcagggacctgccgctttcttggctagtgaagcttcagattttgttaacggacatattctttatgttgacggcggtatcttggcttacatcggcaaacagccgtaaaccgaaatttgaatattttttgagagacgtttatcgtctctctttttttatgtatggtaatatttcgtttgaaaataaagattgttaaaaaaatatttatttatctaatataaaaataaaaatttgaactcgactgatattataaaatgctgtatactaaaactcatagtgtgtatttttgaaattatgacggaggattgttttatgtttgtgggaaaattaaaaagacgtattgtgaaatcagttcttggattacttgccattatctgtgtggtgtcagttatggcaatgtctgttactgtttcagctgaggagaatttattggcatttcccggcgctgtaggcggaggaaagtataccacaggagccagaggagacagcaatatttcagtataccatgttacaaatttgaataagagcggagcaggttcatttgctgacgctgtttcacagtcaggcagaattattgtttttgatgtcagcggaacgattgaaatcagcggaacgctgaaaattaagaaaagcaatctaactattttaggtcaaacagcgcccggagacggtgtgactatttcaggcggggatttacttcttgacagtggagttgaaaacgtaattataagatatctgcgcgttcgccctactgataaaaacggcggcgaacctgatggtctaggcggaagatataataaaaatataatctttgaccactgcagtctttcatggtcggttgacgagcttattactttatacgccggttcaaccgaggacacaaagaatcagacaggaagaaatattacagttcagaatattatagcttctgaaagcctggctatgtcaagccacgttaaaggcaaacatggatacggcggtatcatcggcggaacgaactatacattttataataacttaatggctcatcacgacagccgttcaccaagattggacagagagctggggtctactgatattgccaataatataatttataactggggacagacaaattcactttatggagcggaatcatactctatacataataaaacgcaaacgccttcaaatgtaaatatagtcagcaattattatatgtatggaccgagtactaagagcaatctgagaacacgaatttttgacgtttctaatgacgcaaaggttaagccgtactctaatttttatgttaacggcaactatgttttcggaagccagcttgtgacagcagataataaaaaaggtttgaataatagttcgcttgcaactgtattagaatcaccggttgatatgggcgaatattctgtgccttactcaacttctgaggaagcatatgataagattttatctgacgcaggagcgtctctgccaaaaagagacgctatcgatgcaagaattgttgacgatgttaagcatcagacaggaagaattattaataatgcggatgagatagccgggttgataccgacagaagaaattcacagaacttttgagatacctgaggactggaaagctgaaaacaatatgggcagcgcttctgaaaccgatatagtggaaaatggggaatataagggatatacctggatagaagcatatgtaaatgactggacagccaaagcttctaagcctgctaatcctgagattgtcgttatgtcgccggctattgcgtctgtaaataaaacggttagtgggcttactgtaaataatggaaattggactgttgttaaggatacggaaaccgttaattatcatgcggcagctacgccggctcaggggactgaaataacaaaatttgaactttacgataaaaatcaattgctgaaaacttataactcggctgaaattaatgatgatatatctttagagccgggagtacatcacttgaccagccgtgcttataattctaatggagaaaagacacagagcacaacagctatagtatatgttgtcggaacagccgaacccggaagcttttcatatacgcagataggaaagaactgttctttcaataatctagccagcgcaactatggataataacggtgtttatactatttcgggttccgggcagataactacaaacagctcggataagtgcgcatatatgtataaagaagtcaagggagattttgatattattgtcaaagtaaaggagatacctaagtttgaaaataaacaggtttcgggaattatgcttcgtgagagtctggagccaaactccaggatgcttatgctggctgatggctgggaaaagtacggagaaaatgtaagcgtatttgtcagaaacaaagccggaagttcatcaaccagaagttatttcaaaaatgcttccggaagcgaacttgtaaacggtgataagtacgataccggtgcagccgagtatcacctgcctaagtatttgagaatgaaacgaagcggcgataaacttacaatgtcggtttcggacagcggaatagactttactgataatccgcggcagcctatgagttttacaattgacggtctatctgatactgtttatttaggaattgcgaatgattccgctcagggaacaagtgttaaggaatattactcaatggcaaaatatagtgatatttctattaacggcgtcagcgatgttcagagtcaggagtctcaggttcctttccttgatgaggagtttgacttaaataattggtatggcgaatatgtttttaacgatgataaaaggtcagaaccaatatcaggaaacagcggttaccttttgtcaacttggtcaaacgccaacaggaattttaccgctcagtcaaaaggtatagtaaccgcgtcatttgacttcttagaatatggggataacaataaaataggcagcgctgaatttattttgagaggaacaaatgcggataatgaattaattgaaatggtaaaagttatagctgagagagaccaaacatttaaaataggcgataaatctatcggtgatttagtgcttgatatggatgtttggtataatgtcagcattgaattgaatttctttaccgggaaggcaaaggtttctgtatatccttatacggagtatgacagcacagaaggaaaatatattctatctgaaaatggggctgaggccgagactgattttgataaatcttattcattgagaggaatacgctttgttagaaacggcggaacaatgaagtattatgataatgtttccgtcagcgctgaaaggaatgaatcgtacgttaaagagaataatggcaaaatggatgtatttgctatggaagatgcaaaaatgtatgtggcttggtatgataaggatggagttttaataaatgctgagacttatgatatacctcagaataaggaaatggagtttgacttgccaaaattgactaacggtgtttcagagaaagcggaagttttcctttggaataataatcaggagccgttatgtgaacagttgactgtaaactaagtaatataatagctatagaattggagtgctgataatgaaaactaagttaaaaatttgtgctgctgcactgctggcgtcggttgcgataggcgcaacagtatatgccgctaatttgacaaagaaaatagacgtcctttatgatgatataaaaatattgtcaaataatattgagtttatgccggttgatgagcagggtagtcaggtggaaccttttatttatgagggaaccacatatctgccggttcgcgctgtttcggaagctttaggtaaaaatgtttcatgggacagtgagacaaaaactgttatggtaactgataatgaagatattgaatattctaaaatagcaatcagaaacttttttaaattgttttctgaaaaacggtatgatgaaatgaaaaattttacttcaggctcagttgccggatatgagttttcagaaggagttttcggaatgaaggaagcttctttggacggtataatttatgcaggaaataaagaacttgaaaatgaaaataaatttgcttttatttgtcattttaatatgacgcctgctgagaaatcagtatatggcagcaatgaaagggaaatcggattttttgtagaggtattaaaagacagagatgaatataaaataaatgatttttataccggtctgtaatttagaaagatataataaacaaagccgcgcggataagtttcgtgcggttttttttaatattttttgtttaaattattgagtattataagaaaagcgtacgtttaacaaatttaatacaggcgatgataatttattattgttatcgtgtccttactgcagtttagttaatgtatagttggtaatcagaatttattcgaaccgattaatatgctgcagtctgtatcacagaataacatattttattatattgaatattaatgtttcttaaatcgttacaaatgaatcagaccattatttaaaattgcatagtataatcaagataaaacactaatatcttgatttattaatattttaataccaaacttaattattaatttatattttgaatttaagtaagattgttcaataataaatgaatcgaattttatataatacagggagccatttcttgtaaatattcttgttatattttcttttacttatattgtcaactaatagtaaatctatggttgacaatagttcttgagtatgttataatttggaaaacatttaaggaggaagtaatatgaaaagtaacacattaactattagaaaaatgacgttttgcgcaatatttacagcgctgattgcggtaggagcttttataaaaatcccggtgccgccaataccgtttacacttcaaacaatgttcgtagttcttgccggactaatgcttggcgggaatatgggcggcgtcagtgctttgttatatatgattttaggtcttataggaatcccgatttttaccggaggcggtggaataggttatgttcttaaacctacgtttggctacataattggattttgtgttggcgcatatgcaattggaaaaatcagttataaaaatggtaagctgggcggatatgccagaatgttctgcggagttttagccggattgggaattatatatggctttggtataatctactattactttataacaaattttgttacttcaagttatccgggcttttggtttatgatactgcattgtttccttatgacaattcccggtgatttaattacttgtgctttagtttgtttgctggcaaagagagtgtatccggttaccggcagatacatatataaaaatgcttaacttaaaaattatcacaattaaataaaactaaggcttgtggaatataacccatgagccattttttaataattaaaaagcatataaaaatttatatattagaccgataaaatatacgttttttcggaagttttacaagtaaaaaaatggtagctataaattttttctttaatttttttattgtgattttacacagaaaatttgtcaattttttggttattttaacataagttaaaaaattatgtagaatgttaaaattttatcagtctgactcttgacattaaaaaatatcatgatattattatatttggatttcactggttgtttgaaatatattattaaattatatttttgatacaaactgtgaatgtaaaacatagaaaataactgaaaaacaattacttattataaagacattttaggaggtataatatgtctaacacaaaagagtgcgataagttcctttcacaagagtatttggaaaagatggacgcttattggcgcgcaacaaactatttggccgcaggtcagctttatcttcttgataaccctcttctccgcgagccgcttacaatggaacacataaagaaaaaaatagtaggtcactggggtactgttccgggtcaaaactttgtttatactcatttaaaccgagttattaaaaagtatgatcttgatatgatttatatttcaggacctggacacggcggtaactttatggttgccaatacatatcttgaaggttcttacagcgaaatttatccaaatatcagccgtgatattgaaggaatgcagaaattgtttaaacagttctctttcccgggcggtatatccagccatgttgctcctgaaactcctggttcaatcaatgaaggcggagagcttggatattcactggctcatagctttggagctgtttttgataatcctgatttaattaccgcttgtgtagttggagacggtgaggccgaaacaggacctttggcaactgcatggcagtcaaataagttcttgaatcctgttacagacggtgctgttctgcctattatgcaccttaacggatataagatcagcaacccgactattttctcacgtatttcacatgaggaaatacagaaatttttcgaaggctgcggttggaaaccgatttttgttgagggcgacgacccgatgacaatgcacaagcttatggctgaggctcttgattctgcaattgaagagataaaagaaatacaaaagaatgcaagagaaaataatgacagcacgcgtccgatttggcctatgatagttcttagaactcctaagggctggacaggaccgaaagaggttgacggacagaagattgaaggttcgttccgtgcgcatcaggttccaatcactatggaaaaacctgaacatcttgatcttcttaaagaatggcttctcagctataagccggaagaactctttgatgaaaacggacgtcttatacccgaacttgaggaacttactccggacggtgacagacgtatgggagcaaacccgcatgctaacggcggtttattgctgcgtgaccttcgtatgcctgatttcagagaatatgcttttgatgttccaaaaccgggcgctgtagaagctcaggatatgatagaactcggaaagtttgttcgtgatatatttaaactcaatgaagacagtaaaaacttccgtatttttggtcctgatgaaacaatgtcaaaccgtcttggcgctgtgtttgaggagacgaaccgtgactggaatgctgaaaagctggaatctgacgagttcctggcaagcaacggaagagttatggactcaatgctcagcgagcacatgtgtgaaggctggcttgaaggatatttgctcaccggacgtcatggattctttgcaagctatgaggcgtttataagaatagtcgattcgatgttctcacagcacgctaaatggctcaaggttacatctgagcttccgtggagacagaagattgcgtctcttaactatatcttgtcatcaaacgtttggcagcaggatcacaatggatttactcatcaggatccgggatttttggaccatgttacgaataaaaaggctgatgttgtacgcatgtatctcccgccggatacaaactgcttactttcatgttttgaccactgtatcagaagccgtaattatgtaaacgttatggtaacgtcaaagcatcctcgtccgcagtggctcactatggaccaggctgttaagcattgtacacagggtatcggtatttgggactgggcaagcaacgagcagggggacgaacctgacgttgttatcgcatgctgtggtgatacaccgactttggaagctttagccgcagtaacaatactccgtgagaatatgccggaaataaagattagatttatcaatgttgttgacttgatgaagcttcagtcacatgataaacatcctcatggattgacagatacagagtttgatacattgtttacaaaggataagccgataatattcgctttccatggatatccaactcttatccatgagctgctttatcatcgccgcaaccgtgacttatatgtttgcggatatcaggaggaaggaacaatcacaactccgtttgatatgcgcgttcaaaatgaaatcgacagattccatttggttcagcaggtaatttatcatctgcctcagcttggcaacagaggagcttacttggttcagaagatgaatgataaaattgttgaacacaagcagtacattgcagaatacggtgaagatttaccggaaatcagagactggaaatggtctgaataaaatttataagttgaaataaaggctggatattccggcctttatttttttgtaatcggaaataactctggcagcatatttgaagcttaatgagttttacaattataagaagataagttacttgtaagtataaaatattaagattattttgatgtttgaaaatattttgttttaagttattgaatttatagtataaatcaagtatactcatatcaagggaggaaaaatagatgacggacaataattttaagataaatattacttctgaaaaaggcgttaatattcaacccaacatgtatggattattctttgaagatattaactatgcggcagacggcggaatatatgccgaaatgatagaaaaccgttcttttgaacagataatgcacaacgactgtgatggaggtacaaaggaaacttatagaagcccgggatatgcctggagcgctgtcgacggcgttatgcattacaagacagagaatgggttaaatgaaataaaccctcattaccttgagttttccggacgcaagtttaagaataaggcctatgaaggtatgtatgttgaagccggaaaaagttataaagtatcattctacgccaaagcagacacgtataatggaacggtatctgcttcggcggtaaataatggaattgttgctttcagtggaataatagcagagagcgtcacaggtgaatggaagaagtacgaatcaatattgactgcggaagtcagtatacgatacggtgactttgtgatttctttagaagatgtcggaacggtttgctttgacatgatttctgtaatcccttgtgacgctgtgtgcggagtgttcaggcgtgacctggcggaaatgcttaaagagatgaagccggggtttctcaggtttccaggaggctgtgttatagagggatgggatattgaaaatcggtatcaatggaaacatacagtaggtcctgctcaggagcgaactcaaaattggaataggtgggctgtatctaaacggccaaaatatttagattataatcaaacatatggtcttggattttatgaatattttctgctgtgtgagtatcttgagtgcgaccctttgcctgttttaaatgttgggctttcgtgtcaatatcagggaaaagaaacggttccggtttatgctgaggattctgagaaagatataggtgtggagataaacggtgttacgtattcaacggaattttatcaatatatacaagacgctcttgaccttattgagttctgcaacggcgatgaaagcacgctatggggcggattgcgaagttcaatgggacacattgaaccgtttaaccttacattgctgggtgtgggaaatgaacagtgggaagctgacgggaatcagtggtatgagagatatgaggagtttgagaaagttatacattccgtgtatccggatataaaaattatatcaagtgcaggaccaagcccggatggagataattttgacagcgcatggaaacgtataaaaatgaatatggctgaaaataccggattcacatatgcggttgacgaacacttttacaaacccggggaatggtttttaaataatgatttaagatacgatggttatgataggtcaataaaagtttttgccggagagtatgcggcagagcaagatgggaacacactatattctgctgtgacggaagcggcgtttatgacaggtctggagagaaatgcagacgttgtatatatggcaagctatgcgccgctgttttgccgcataaattatatgcagtgggaaacaaatatgatttggtttaatgacatgacttgttatggaacccccaattattatgttcaaagcatgtatatgaacaacagcggagattatactttgaaatacagtataaccggcggtaatgataaaaattatttatctgtatgttataataagaatagcaatgatataatagtgaaaatcgcaaatccgtcggatagggatattagtgtggatttagatttaagttctttcagcgatacggcagaatttgcagacactgctcatattgaaattctcaccggagaaagctccggttctgaaaactcaattgataatccccaaaatatagctccaaagcgttcagaaataatattgaatgataatataaaaattccatctttgtcatttgcagtaatacgaatacatattttaaatcaatatttataataaaaagttttttaactgtttcgttttatgctgaaaagataataaaaattttagacagaaaaaatatggatgttttaagattaaaatattctacaggtgttttatcaacgtatagagaattgaattatgaaaaatctgaatattctataacttttaataaaataatttatttgatttctgattaatatgtatattagatttaatcagtgcgtgttcagacgagagctcacctaacgcggcgcgttttacgcgccctgccgaagttcactgatgcaatatttaaatagtaaataaagtcacaggtttataattataaatattttttatactaatttaaatttgttgtacaaataatgatttgattctgtgacttttaactgaaatatgtaccggttatgtatattgcattatatataactagtataaaattgtaatatgtatttataaagtttgaccgcattatgagtatcccaaataatgacattattagtaatgataaaatgagctgatctgtataatacccatcttataggttggagaatagttacagcttagtcaaagtttctaaaataatgacattaattaattcaatcataaagttatagcaatttaatttgaaagccatatataataggtttaataaattattgagtatatataaaataaggagaaaataaaatgcttaaagttaaaaaagctgttagagaagagattttcggtgatgaccgtgagtttgacagcccgcatgcgccgacggtactgccgcttaaaaataacaacgtgcttgcggcatggtttggaggcaggtttgaaaaggatccggatactgctatttggactgcaaagagattaaacggcgtgtggcagaaacctaaaaagactgtggatgttatgaatattgctgcttggaatcctgtgctttttagactcaataatgatagaattattttatattttaaattaggtcctgaaatcccaaaatggcacactgaatacgtatattcagatgatgagggcaagacttggagcagcccgaaagaactcgtaaaaggagatataggcggacgaggtcctgttaaaaataagcctatatatttgtcagataacaagactattcttgcgcctgcttcgcttgagggggattcttggaactcgtttgcagacatttcggatgataatggtgaaacatgggaaatgagtgagtttgtccctatccgcagaataaatccaaatgagcgtagaattcgtgacagggtatataacaagactttttgttttggaaaaggtattattcagccaaccatttgggaagatgacgaaaatattgtacatatgctctttagaagcacaagttcaaggatttataaaagcgattcgtatgatatggggagaacatggaacttagcttatgacaccgggcttcctaacaacaatagcggtattgacgctgttaaacttccaaatggaactttagttcttgcatataaccctagggaaaatataccgggaatgacaaaaggcgcaagaacgcctattatattatcatattcagacgataacggaagcagctggaaagaactttatattcttgaaaattgcgacggtgcatttgcgtatccgtcaattgtttgcgatggaaatgataaaatttatgttgtatatagtgaaaaccgggagaagattattttttggaatattgaatacgaagagacagtcaactaatcggaggcagctatgaaaaaggttgattttgataatgaatttaaaaatcccggttcagagtatcgttcaattccattctgggcttggaatgatgagcttgatactgatgaaatcagaagacagatacgtgaaatgaagtcctgcggtataggcggattttttattcattcgcgggacggtttggagactgaatatttaagcgataagtggtttgaatgtgtgtctgcagctgttgatgaggcaaaaaagagtggtatgttttcatggctttacgatgaagacagatggccgtcaggaacctgcggcggaagtataactgcaacggataaaaacggctgtaaggggcttacgcttgaagtatgtttttctgttcctgagaagatagaaggaaatgtactcgtattatataaagcagaagttcatgaaatggaaatttacagtcttgaaagaatatgtaatgctgacggcttaatacttagtgataaagaggctttgctgattgcgagacttgaagtcagcggaaagtctgaatggttcaacaactccgctcctcctgataacttgagttttgatacagtaagtgattttataaacaatacacataagatatataaaaaggcggtaggcagtgaatttggaaagacaattcccggaatatttacagatgagcccagcctcgctgacaggcacgcatcgtttaatccaaatcgaagctggataccgtggactgaggaatttgagaaatacttttttgaaaaacgcggttatgatgttttagatatgataccatacttttattttaatggtgaaaagagtgcaaagataagacatgattactggcgaacggtctcggaacggtttaaggaagcctattcggttcagattggagattggtgcagagaaaataatctattattcaccggtcattttttgcaggaggataagatgggattatcctgccgtgtgaatggttctgtcatgccccattatgctgctgaggatattcaggcgattgacatgctcactgaacgtacagaggagtatataacggttaagcagtgttcaagcgtctctaatcagctggggcgcggggcagtgctatcggaaatgtatggatgtaccggctgggatttcagttttgagggacagaaatgggtaggagactggcagtatgcgcttggagttaatcagaggtgtcagcacttggcgctttattcgcttagaggctgccgcaagcgggattatccgccgagtataaactgtaacaccagctggtggaaggaatataaaacggtagaggattattttgctcgtctgtcatatatgttaagatgcggagagccgataagaacggttctggttgttcatccaatgacaacggtgtggagccggctgggatgcagtccttatggcaatccaaagaggaatcaggagcgtgatatacctaagcttaatgaactcggagatacctttaattcactcgtaaaaaatctttgtaaaaagcattatgactgtgacctcggtgatgaggttataataagcgaatacggaagctgcagcgatgataaatttgttattgggaaatgtgagtacaatactgtgataatgccattttgcgaaaacttgctttcagaaacttatacgaaagttatggagtttatggaaaacggcggaactgtgcttggacttgctccgtttccgagattaattgagggagaattatctgaaaaattatctttgcttataaatcatcataattttgtgaaactgttttcagaaaatgagcttattaattatttggataaaaatgttaaacgcgaagtttcaataatttatgagaatgataaagaggaagaaaatattctatatcagctgagatatgacggaaacggatatatcctctttttatctaataatgacagggaaagcgctcatgaggtcaatataaagttagatgttttagagaacttggaacagaataatttatatgtatattctttaaatcttttaacaggaactttaacgtcttgtgatttcaaatatgcaaaaggcagggtatgttttgatgaatatatgcaaggctgccaaagctcaatgttttatattaccaataaatatgttgaatgcggcagcagagatgttcagatatggaatgcagaagacaaccggattaaaactgaagaaattccagtcgaatatatcgcatatgaagccgatacaaaaaatattttagctcttgatatgtgcagatattgtatggatgaaaagtggtcggaaaacatagaggtttggaaagcacaaaaagaaatcagagagaatcttgaaatgcgccaaatttatcataatggacttgagcaaagataccgctgggtaaacacgcgtcataaaaacgatggaaaagatgtttggctggaatttgagtttaaatctttaaccggcgtggatgatgcagagttggttattgaaagaccggaatgctttaaaattgaactggacggaaaaataattgataataattcggtcggctgttttttggataaatcttttaaatgtattcagcttccgaaaataacggaaggtgttcataaactgagactgcaatgtaattacacaaacgatatggagcttgaatgctgttatatattaggtgattttggagtaagcgcaaatcgtgaaatcattaaaaagccggaatctattagtttgggcgatataacggggcagggatattttcattattgcggaggtatagcgtataagtttaaatgctgtttgcccgaattgccaaataaagaaatatatttaatctcaaaggattttgacggagtatctacgtcagctgttataaacggcagtgagattaaaattccgtggaaagaagccgggactgtggctgtcggaaagtttttacatgagggagaaaatgagatagttataaacgtgtacggaagtcctaggaatatgctgggaccattgcatataacaaataagcctttggttaccaaagacagttgtttctgccctttaggtgataactactcgccgaattataatgtggtaagcgtaggattaatgaaaccgccgagattgatttattttaaagattagtttctttgatgtgatcccaaaaagttagactatatagcgcagcagtttgatgactgctgcgttttttatgctgctttagcttagtgcctgtgcaattctttgacaggcttcctttatttgagctgtggataatcttccggtaccaagtaaaaatgtgcgttttggaatcagaggcgacggcagaatgctgtattctttaatagacatgatttttactccggccgcactgactttgctttttatttcagaggatgacatgtcaagattaaaggttacgattacgtttgtgctgtctgaatttggggatattgttatttttttgcctaacgattcgataagttcacgttttaatagttcgcgtttgtctcggtatacccgtcgcatggttttataatgcttagtatagtatcccttttcaataaattcagccaaagcgtattggtctgtttttgacgcaaaagaagaataaaacttgtgtttttttctccattttgaaagcagttcgtcaggcagtatcatatatgcggttttcaaaccgggacacagcgctctggaaaatgtgtttaaaaaaatcacctttccgtttttatccatgctgtaaagagtgtcagatgaatcccacgtgagttcggaatcatagctatcctctattatatatctgccgggagattcagacgcccatttaagcaaatccattttaagctcttcgctcattttataacaggtcggataatggcagtggggcatacaataaaatatactgcaatttgatttatataaatcgtctatatttaatcctgacatagatataggtatattaataacgtccgtgccgctgtcggtgaaggcgcagtacgagcgtgaaaatcccgggacctccattccaattttcccaaaatctatcagaacatcggcaagctgcgtcaacagatactccgagcctgcacctatgattatctgacgcggagaacatttaatatcgcggaaggaatataagtattttgcgacagcggcgcgcagagaatgttcgccgttcttttcgggatgattaaaaatgtcaattccgtcattatagacaatattgcggacaattttagcataactgctgcgtttgaaataagtaatatcaacagcgttaggcgtaaaaacataggtttcgcctgcgtcaatatcccatggaatatcctcaaactcaccggagttaaatgagacaaaatgccctttttttggtattgaaattatatatcctgtgtctgccagcatattatatgcttcattgacggtgttttgtgatacagagagctgcttggctaatatacgtcttgccggaagtttaaatttgtcaggcagaaaaccatcggaaatatctcttactatagcgtcataaagctggatatacaggggctttgacaatgatttgtccaaagaaatatttttcattcagaatcccccaataaaatatatttatacttaaatttattatatcattacaattgatttttgacaatactttggtactgtaaaaaatataaactctggtactgtaatttgttattgttttttgttatatttaaacaaagagaaaaaacaactttaaggagggttaattatgatgaaaaaacagtttaaaagactggcaagtcttgctgcggctgtgactgtttttgccgggatgtttaccggtattacagtaaacgcaaaatcggaaaccgtcagcacagcggagacaagcaatctgtttgattcagaaaacgttatgtggacagaccaaaaaataattgatggattttgggaaatggatccagatgtaagtaacaaaactaaaacagatattcaaaatccgtatggtaacagcggcgacatgtatgacgcacatgcgtattatgaatttttgtggacgcacggttatccaataggaaacggacgtatggcggctatggttatgggtgcgattgacaaagaggttatccagattaatgaggataccatttggaatggttcgccatatgttggcgaggacggcaaatcaaccgccggaagtgtaaaggatacatggaagtattacagaggcgccaaagcggacggcacgcctgccgccttcggtgaggagggcgaccaggttctcacgggcgatgaggagttccgtcagaaattccctgcatttgcacataagactattacaaatatggcgcttaatatagataacagcgatacacaggaagctgtttcaaacagacttgaccttgcaaatcttacaaatgacaacttcctcggaaatccaataaaacagagagcatattcagaatttgttgagcttttcttggactttaatcaggagagcggaaaagcgtcaaattatactaaacgtcttgatatgagcaatgcggttgcgactgttgagtatgattatgagggaactcactacacgagagagagttttgcgagttatccggatcaggcaattgtgacaaaagtgaagtcggaaggcggaattttagacttttccgcacagcttcacacttggctgaaaggaggacagcaatttgagaaaatttccgataatgagattaagataattgccagacctgcaaacttatcagagagtaatggtttggggaatatgtcgaaaattgtgggcgaggcaagaatgtatattgacgcaggaaacggggcgaaactcagcgtttctgatgattgttcaaccataaacatcagcggcggcaatgaggccgttatctacatagtaagcgcttctaactatgttgattacttaactcttgatgacagtaagcctgctcgtgactgtgataaatatatttcaaagataaaaaacaagtcatatgaggaaattaaagaggcgcatattgctgattacaaagaactttacgagcgttctgagcttactcttggaaacaatgacggcacggacgaaagcggcactccgacagagaaacgtgtgcgtaaggatgttaaaggcaaatccggttatgaaatcggggcaggtaataagcttgaagctaaaacccctgttgattcaacttataatgacggtgataataagctggttacaatgatgtttaactacggaaagtatcttatgatttccggctcacgtcccggagatactgagaacgatattcctataagccagccgcttaatctgaccggtaagtggaatggaacaaacaatccgtcatgggcaggaaaatatacaattaatattaatactgaaatgaattattggccgtcacagccgcttaacctttctgaatgcgtatttccgcttacagaaatgcttcagcagttggccgaaaacggaagcataacagcagattatcagtatggtataaagaatcacagaaatgacgataagtatattcccggcgacccgtgggtaatgcacaataatacagacctttggcgcggcacacagtttgttgataattccgacgtgctttggcctatgggcggagcatggcttatggactgcgtttggaagtattatcagtataatcttgatgagcagtatcttgcggaattattcccgattatgcgcggccttgcagacttttatactcagttcctggttgttgacccagtgaccggttatcttataactgctgcttcatcatcacctgagcagggaagtgttcagccgggttcagcaatagatacacagcttataagaaacctatatgatatggttctgaaatccgcacagatacttggcaaggagaccgaggaagctgagcttattgcaaaaatcaaagagcaaatgcctgaaaacggttatttctcatatgagcagggtaaacttgcaccggatattatcgaaaccgataagagccatagcggctatgggcttatcagagaatgggccagaggagacgttaaatttgacttctcaacagcagattcaagcaataagttatggacttatacatacccatttgtaacgggcaacgctgctgaagacacggcaaaggagagcagggctaaatataagtccggtatgtatagaaagcatactgctgcgaatggctcagagtgcgggcacaggcacacatctcatctttgggaactgttcccgggaacacatataaacgcttacagcaccgacaagcatgaacaggaaatttacaaagcgttccgtcagagcgttcttgcaagaggcgccggcagcggacagggctggggagttgcgtggagagttgcgctgagcgcaagagcgcatgacccggcgacagctgatacgcgtattgaacagcttatcagaacaagagtttcgccaaatctgtttgaccagcatcctaacttccaaattgacggaaactatggtcttacagcaggcataaccgaaatgcttgtacagaagcagggagattcggttgagttcctgccggcaatttctgacaaatggcagagcggaagcttcagcggatttaaaataattggtaatattgaagccggagcagactggaaagaaggaagccttactaaggcaacattaaaggccgcaaacagcggaatattaaaagcacgcaacagctcgcttgataaaaatgcggttgttgttgacagcaagtataacaaggtgccgttcacaactgaagaggacggaactgttatagcatttgacgctgcggcaggagagacatattcaatttatcctgctgattatgtacagaccacaggcgagagcacatgggaaaagtatggtgcggaaatttcatcaaattccagctgggcaattaaaaacaagtccggcagcgctccgaaatattattcagacaacttgtatattggaaatttggccaatgataattcttatatcggttttgctgttaaagactgtgatgtgcaaaatttaaaaacattaggtgttaagatagcgctttatttcttaatgattgacaattcagaggtttcagttagagttggctcttcaagcggtactgaaattgcgcacaaggtttttgacactgcgaccggaggaaataagagctttgcatggatagacataccgctcaatgaggatgttgaccgttctctgcttgaaggcaaaaaaacgttgtgcttcttatttaagactgatttaaaaaatgatggtacaaataataagtatattgccaatgttgagggtgtttcgggtaccgtattggtagagaccggagagaagcagtatataaacttaaagcataatggagacgattattatacaactcttcttctcaacggaacctatacggctactatttcaaacgatgcaccggacggcactttgattattgcaaaatatcgcggtgacgaacttatagacacagtaacacaagagataaattccgaaaacagaagcgctgaaatgaatatttcagatgtagaaagcggaataacgatgaaagtaatgtattgggacagcacggacggtatgcagccgctgtcaatgatgcgtatattagaaacgtccggcacttcggtgccggacgttccaactcctgaaccaactgaccctcctgttcctacaaaggaccctgtgccatctatgaccccaattccgtcgcctacagcaacgcctgcattgccggaagtgacaactgagcctacatctactcctgctcaagagagcggaactgtatttactgttgacaaaagcggtgagacggatatttcaaagaatcaatacaagactattcgcgaggcgcttgcctcagcggcagaaaaaagtctgccaaaggaatgtctgataatgagataaatagctggcttcagtctagaacgtatataggaaatgaatataacctcgacccggagaagaatgggagaaaagattcaccaagagagcgtgcctgcgcattgtataccgcttctgacagagttataatacgcgattgcagagtggtttcaaagcaggacacaattggaataaataaaaaccgtatatattttgaaaattgcttcttagaaggaacaaccgattatatttgcggaggtgcagtagccgttatgaacaactgcaccctcaatgtcggttcggccaagcctatggattcaaatacaggcgcaaccgattctgcctgcataacagcggcgggacagtcatcaggcaatggatatttattctataactgcgaggttaccggaacagattgggccacaccgagcgagttaggaagaccatggaatgcaaatgcggaggtcacatatataaatacaaaaattaataaatgtaagcgcagcggatatacgaataagtatttgatttcagataagggctggacagatatgggcgataataaagcggaagacgcccgctttggtgaatatggttctgtggacgctgaaaccggtaaggccattacaagcagtgtgtcaatacgtaaaaagtttatgctgaacgaatggtcaatgcttgagtataacccatataattatctcagaggcagcgataactgggatccatccggtattaaccggtattattcggagtttgatgagattgcctcttcaattaacattgacacttcaggtgaaggcgatattattctacctgaagcggcagatggttatggttatcagtgggaatcagacagcacatacgcaagtgttgacaaagataagaacacaatttctattattcggccattatatggagacgagcctgtagaaaccaaaatttcagtatatatacgcaagaacggaacacagtacggcgcgagaaaggttattccgcttacaattcagccgcacagcagtgcggaaaatacattcagtgtaaacggaaccgtaagcttgtcttctgcttctgaggaggaagtgaaagttacagttacacttatgcagggcggctgcccagttaaaactctggatgtaacagttcctgccggtcaggagagtgcagactatacgataaataatcttcccgagggcagttatacagctcaaatatcaaccgatacgcgtgaatatactttgatgacagattcaagcgttgagctttcaggtaaatccggagagacaaaggaattaaatatctcgctgagcgagtcaatggctacgccttaccctgcaaaattcactgttgacgatttaatcaaaacagaagatatgatgcgctggagcaacggcgtagatgtcacaacttcgtctgacagcacaaagcctcttaaaacggcttcaagcgcaagcgcaaccaaccttttggtaaaaactcctgaaaactatacagcggagtatgaaaaagcgtttggccctgcagatagtttgcgtacgaatttcaccaagaagctgggctatataaacttctgcgccgaaagtgaggaaagcactccttctattgacacatatatttcagtttacttctcagtatcagaggagcaggctgcaaagggaccgtacaaggtttatgtgcttaccaacagaaagcgtaatgattcacgcatatctattgagacgccgaaagttggatttgttgaaaatctttcgattgattttgtaaatatgtcaacagataccgacggcacaggagtacatgtaattgagcttcctgagtttaaagcgggcacatatgaattcaagtggtatccggtgagaacggcagacggaggcacaaaagttgcttcagatttctttgctttgagattccttccggtttccgagacaggcggaaagtagaaaataataaattgaaaaaacaataatttcttcccaattaatattaagaccttaatcttaaaaaagaatcatcttttgactgactaaggtctttcttatgtgtttatttaaaattctataaaatagtattattatttggaatacctattatgaatataaagtttaataagaaagaaaagcagatattcattaaccggttttttatcaggcgtattgattgaatctataactgcggacataggcatagttcacagcacactgtattctttgattaacaatttaaagaaaaaataaaagtggacaaaccctttagaaaaaagaatttgaccacttttataaaaatgcttggtggatcttcagggactcgaaccccggacctaccggttatgagccggttgctctaaccaactgagctaaagatcctcatttgttctgactaatttatagtctcgaacaagaacttttatattataatccatattattctatttgtcaatactatttttataaaaaatttttaaacttataagaaaaaattctctaaaaaattgttaaaattgcaaaaagtacttgcaaaatatagagttttagtatagaatgtaaaaaaactgatattattttttaggaggtacacaccaatgataactgctggtgattttagaaatggaatgacatttgaatatgacggaagcgtatgtcaggttgttgaattccaacatgttaaacctggaaaaggcgctgcttttgtcagaactaaatttaaaaatgtaataactggcgcggttgttgaaaaatcttttaacccgactgagaaatttgaaaaggctatggttgaaagaaaagatatggaatatctttatcaggatggagatttatattactttatggatcctgaaacatatgaacaggctcctctcagcgctgaccagttaggcgacgctcttaaatttgttaaagagaatatgcaggttaagttttgttctttcaaagggaaagttttttcagttgagcctccgacatttgttgagcttgctgttacgcatactgaacccggagttaaaggcaataccgctacaaacgtaacaaagccggctactcttgaaacaggtgctactgtgactgtcccgatgtttattaatgacggggatatgataagagtggatacgcgtaccggagagtatatggaaagagtataattataatataataggaggcattattatgtctgatttgacaaaagaagcggcatatatcaaaggtttgttcgatggtatgaagctggattcccagaaggatgaaacgaaaattttatcatctataattagttttttagagaaaactgctgatgagatagatatgcttgaccaagagcagggatttcttgcagaccaaattgacgatgttgaagaagttattgatgttttagcagaggaaatcagcgatgagtatgacgaggacgctgatgaatatcaaattaaatgtgacaattgcggaaacaatgttcattttaccggcgacgacattgatgatttggttgaaggtaatttcgactgtccatattgcggtgaaactgtacagttggacttgagcggtatggaagacggatgtgactgcggatgcagtcatgaccacagcgaagaatagtatttttgaataatatttaaaacagactgatatatcagtctgtttttttgttatgtttaatttgttatgaaatttatttctataattttgttttctctcggttatagttttagcttattggtaaagtggcacgcgctgtcattctaaataacctaaaatgaaataggataccacagaaaatattatagaaagaaggttagttaatggctttatggtatgattctaagaataatgagtatgcttcagatggcaaaaaaggctggataaaatcgtattgtgataaagctttgtctgaatttaatgatttattgtcagcacattttaaggggcagtctaaccgccatatggcatgtgatttggattttgacagcaatatgacagttgaagacaagctgaaaataattgaagatgaaagcaatgcggcagataacagattaaagactgagcttgagagcaaaattaataaaaaagctgacagtataacaaacggcggttttgtggcaggcggaggagtagtaagcgaagaagaaggagcggttgttattggaaacaaggccgagtcgtccaatggtatatctataggcggcggagccttaagcaaaggcggtatagctattggaagagatgctaaagtgtcttcaagtaatggcgtacagcttggcgcaggagaaaatataaaagaaaaaacattaaaagtatatgactatcagataacagatattgattctgaaaccggacaatcatatataaaagatattggaagactggcagatattaatttaaatatagttaatgttgctgacgctatcaatactttaattgatacagatgaagatactgtaaatttaataaccaatgaagtcagcgcccgaattgaggcggataaaaatattaaaaaggaaataccggtcaaaacaatagagaacataacgtcagagactacagataacagcagctatgttacaccgcttatggttaagaatgccgtaaataatttgattgaaagctctgaggagataaaaaacattactgacggcttagctcaaaaggcagataaggttacaaacgggggctttatagccggcggagcacaagcaggcggagctcaaaatatatcaataggcgacggtatagcctctaccggcgaacgcggagtagtaattggagcgggagcagagggagccggtcgctgcgttgcagtcggaagtgcgtctacggcggcagcggctaatgctgtcgcgataggatacggtgcggaatgtttggcagataatgctgtacaaatcggggacggaagtaattctgataaagaaacattgaaatttcgggattataaaatagttgaatgcgagagtaactctaatgcacattatttaaaagatataggaaggataataaatcttgagacaaaagataaaaacagcattgtgggagcggtcaatgagatttataagaatcttgaacttagtctgatagttcctaacgccatttcacagagcgttataatgacaaaagattctgacggaaagtacaaattttcttttactttcaataatgcgtatattacgtcaaacagattatttgataatgattttaaaagtcagattaataacacgtttgaaataaatatgttagatgcgccagagtttaataaaccatattatttatatcttgaatgggatttgattctggatgaatttacaatgtttagtacagccgataattttggaactaaccttaatactgaatgtttgcagttttatataggtacgtttactatagtggatgataaaacagttgattattacgatgagcaggagaaaatttctgtaaatcttataccgatgataggaaactatctgtcaagactggattataaatgttatgaactgcaaagagatacggccaaaaagaatacagctgtattattacagaaacttgataagacggaggaatttaacatttggcaaaacggtaattggatagtgggatataatataccgcccataaaaattacagacgagacatacgggagctttacactgccgtctcaaatgttggaagcggcgggagttaaagaggaagcaggcgaagagaaaaaatattgttatgcttcttacgtgcttgacactgataacttatcaggtgaaataagcggttctgatatgacggtgacatgcggattaaaagaggcaaagggaaaaccaaacagctatatagagatagaagatgaaacgaagttagcaactataaatatatatctcggaactattatattaaatgcagaagattacatgacgcctgatggaacctcgagtactatatattcaggcagtgaaacaacaaatacggaaatgactattgatttattcagaatatttacagagtcaaccgatgtatcaggagagttagtagaaattacagcagatgaggtaagtgcattattttaattataaaaaattatattttgaaaaatagcagtgaaaataagtcatgttaatataattattagttcggctcatgtttttagagtgagagttttataaaattagcaggcaatgcttgcatattaattaaggaggaaatattatggcaacaaaatttttaggaacggcggcattaacaaaattagtagaaaagattaaggcggtatcaacagcaataccgataaagttaagtcagcttacaaacgacagcggttatcagacaagttcacaggtatctactacagttacgaatgcgacaaaggatttagcggcaaaaactgaggtaacagctgtagacaataaaattggagatttagctgatttagatacagacaatacaagcgtagttaatggaatcaatgacgcatgggcaaattgtgaggaaataagggacaatataggaacaagagcaaatttaacaacgactgctaaaacagaccttgtatcagctataaatgaggtagacagcaatgtagataatttacaggaaactatgatgacaggatattatacaaaggctacagtggatacaaaaatagcagagtctaaagcaggactagcaacagaaacatatgtaaacaacaaagtgtcaagcgtatacaagtataagggcagtaaggatacatatgggtccttgccgacaacaggaaatgcagttggagatgtatggaacgttgttgataagaacggacagaattttgcgtggacaggctcagcgtgggacgctcttggtgagactatagacttaagcggatatatgaagaatgacgcactgcaggaaattacagcgacagaggtagaagctttatttaaataaacctggagggatatagatggcaacaaaaattttaggaatgacagcattgacaaagttagttgataagacgaaaaaatatgtaaacgataaaaagatgataaatgtaatgaatgattcaagtgcaagtggaaactactctgttgttttaggaggacaggggacggtgcccggagtttgttcggtttcattgggcggttattctaatgctgtgaatggagaaagggcagtagcaataggcggctggtctttgctctgcaacggttataatactgtgtgcggtaaaaataatttagaaccaacagccggatattattctcataataacggcgacggatttatagttggaaacgggactttaagttcccgttccaacgccttccgtgcggcgtacagcggtgatgtgtatgctatgaagtcaataaacggaaccggagccgactatgcggaacttagagaatggtctgacggaaatccaaataatgaggatagatgcggactgtttgtatgctttgacggcgagaagatacggcttgcaaattcagaagacccaaaagacttacttggagtaatttcaggaaatccgtgcatagtaggaaataactatgacgaccagtggagcggtaaatataagaaggatgtatttggccggttgctgactgagcatgtaatgtgggatgaagaaacagatgataatggcaatattataacacctgccggtgagggagatgtatatattttatctgaagattacgatccatcgcagaaatatatacctagaaaggaccgcccggaatggggatatatgggaacgcacggagagttggttgttatagatgacggcacatgtgaagcaaaaggccgatgcaagccgaataacgaggcaaaagcaacggcggcagaagatggattttatgtgcttgaaaggatagatgataagcatattaaaatatttatgagataaaacggttatattctgtcaaaattagttcggttaaaattttaaaaaggtcagcgtttgctgaccttttttatatgataatagcaaaataaaaatataaagttaaagaagacttttaacggtgttacaaatatttcagcaattacactgtgatgtaatgaaaattatctgagtgggacgattactagctgtacaagatgcttagagcagttaactgaactaatttatacgccattgtcaacaatctcaagcggtttattagaccaaatattactaaattgttccatagaataatttgacataggataaacaatgttgtaatattgtattaatacagaaagggatgagcgttatgataaagaaaatattagaaaaaaccatggttttaattgcggtagttatatttataggaacggtaaatgtaatagcagctgataacaaccacattactgtttatgtaaatgattcaatattggacgctgatgttaatgcgcaaataattaacagcagaacaatggttccaatgcgcgctatttttgaagctctaggagctgaggtaaactggaatgaggaaaatcaaactgcagtcggcacaaaagatggcgttacaataagtctgacaataggaagcagaacaatgtatgtcggtgacagcgttaagaagttagatagtccgcctttgatagtttctgatagaacattaatgccggtcagagctgtttcagaagcttttggatttgaagtgaactgggacgaaccaactaaatctgcttatataggaagccataacaggcttgacagtttaaagcagaagatttcagaaatgggtattgatgataagatatatcaaatgatgattgtaactcctgaatcaataaccggggttgaaaaagctactgaagccggtgaggcaacaaaggcggcaatagaaaaatatcccgttggaggtttggtatatttttctaaaaatattgtcagcgagaatcaaataaaaaatatgattaataattctcagtcctattctaaaatccccttatttatatctgttgatgaggagggtggaagagtagcaaggctcgggaatgccggtattggttttcctaaaattccacctatgaaagagattggcgattctaaggatgttggaaaagcttcagaggcaggtgaaacgcttggaacagcgctgaaagaatatggttttaatcttaattttgctccggacgcggatgttgaaatcaattctaattcctcaataggcgaccgttcgtttggcagtgaccctcagcttgttggacaaatggcgtcagccgaaatcagagccatgcagtcaaaaggggttagttcctgtatgaagcatttccccgggcttggtgcggctgaaggagatactcataacggttttgttgcaactgacaggtctttagaagaaatgaatttatgtgagtttgtaccgttttcatacggagccgcagcagactgtgattttgttatggtaggtcatatatcagcccgaaagattactgaaagtgatgttccgtcatctatgtcttcaagagtgatagctatgcttagaaacgatattggtttcagcggcgttgtaataactgacgccttagacatgggagcaataattaagacttatacgacgtcggaagcgtgtatagcagcagtaaatgcaggagccgatattttgcttatgccctctgatatagatgaagctcattttgccttagcgaatgctgctaaggaaggtattttaacagaagacaggattaattccagtgttatgagaatcttagataaaaaaatgtctagggggttaattaattattaaatatgttttttaataagagtttattgctatagaattgagtattaataaatatcaaagcggtgtttgtaacatggttgtaacacgtttgtaatattgttgaaataagacaagctggttagctaaaataaaaaataatttatacatgttgcacaaaaaatgtatgataatttagtgtttattccctcttgtaaaagtatttagataaggttataatttaactataagaaagttaatttataaaaattctgaaagggggagcaaaaatgaaattcagaaaggtgatagtcggagcggttactcttgcggttatgtttgtatcatgcagcggattaagttgttttgctttatcagctgccggttcagacaaaccggatgatattgaccaatctacgtttgagacagttgttaaaatagatgaaaatcttaatatgattatggataaaaatgagaattctgaagttgtttgccaatctgatattgacgaactcgctgcccttattgatagatttaatgatagcattattaagcaaaactccggtttgtcacaaattcattttgatatcatttggaaagttgattttgtgactagccagatacctgaaaaagataaacttgatatgagaaatattcaaaagagtattgaaagttttaataatatagtcagacttttgaaaccacgtacggaaagtgctgaagctgtcggataatctgtatttggttatatttatcaaagtataaaattgaaaataaaactccaaaccaaataatcaaaacaaaattttataaaaccctcattatttctttttataaaagaattctgagggtttttattcgttagtcagatgagaattaacaaaataacccaacaaattctaaaaaagtcttgtgcagttgttttgttttatgatataattactaaaatagaaagagttacagttctatattgatatgaactaagaaggtgacttaaaggtgacaagtaataaaaaacgaaagattcttgtagttgatgacgttgagcagaaccgtatgatattatctgaaattttaaaagatgactatactgttattgaggctgatgacggtgatgtttgccttaaaaaattgcgtgaagataaagatataatcttagtgttgcttgatattgtaatgccaaaaatggacggatttcaggttttaagagagatgtctaaagataaagaactacagcacaaatccgtaattattacaacggcagacagggccatagatgctgaaataagagccttgcgtgatggagctgtggattttcttgaaaagccttataattctgatatagtaaaatgcagagttgataatatcgtgacccgtatagttttggaaagcgaaattcttgaagaaaaacttgatttagccaatgagcgtttggctgcaatggtagatcttatacctgacggcatagctatatttgattactatgagtcgggcagggtggatttaggatattataatgaatattttgcaaatatatttaatattacgcgcagtatagctgatacggagaaaatatcttttgaaagtttaaatcaattatttgaattggatttaatttatccgggcgacaggagtcatcttgaagaaaaggttaaaaaatgtattgatgatagcggaactcttacatgtcagtttagaattaaaaggaatggagcgtttagctgggttcgtatgtctatgattacatttttgggcagcaatggagtttgccgctgtcatgttttattctctgatatttcttctgaaaaggatagagaagaacagataaccgacgcgcttaataagcttagatatgtaacgagacacgataaattaactcagatttataatagagaaactttctgcgcttccacagataagctgctcagtgtcaatccttctgtaaaatactcgattattatgtgggatataaaaaactttaaagtaattaatgaattgtttggcagcgataagggcgataaaattcttatattaatagctgatactttaaaaagtttggtaggaaacaatggaatttacggaagaatggagtctgataaatttgttgtttgtattcccgcaagcctatgtgatataaattcaataattaataaaatggatatgacgctcaatagcgccaatattgttgattataatttgaaaatttttgctgggatatataatatcatcaatgatgagaaaataccaatagaccagatgtgcgaccgtgccaatatggcgcttaaaagcgctaagcgtgattacgtgaacagatattcttattatgattctgaaatgcgtaaaatggttatggaagaagaactgatattgaacgatatggatactgctcttcaaaatcaacagtttaaggtatgctatcagccgattttcagcgtcaccagcggaaagccaatagctgcggaagctttggttaggtggatgcatcctgacaggggcgttatatcaccgcagaagtttataacagtttttgaaaataataagttcattacaaaattagactggtgtgttcttgaagaggtttgcaaatttcaaaaaaagcgtctcgacgccggaaaagttatgctgcctatttcggttaacttttccaggcttgattgttacaaacctatgatatgtgaaaatgttttggggttaattgaacaatatggactaagtcccgatatgataaagatagagattacagaaaccgcctatacaatggataaggaacagataatagatgttaccaataagtttaggagttatgggtttcaagtccttatggacgattttggaagtgggtattcatcgcttaacactttaaaagatgttaacatagatattttgaaaattgataaaagatttattgatgatattgaagattcagataaggccggtgctattgtttcgagtgttgttcgaatggcaagattgattggcatggatattattgcagagggtgtggagactcagtatcagaaagactttcttagaggtatcggatgtgataccatacagggatatttttattctaagcctttgtttgagaatgaatttaatgaggttatagataaatatagtaagctgccaattgataaatgtgtatctgatattagagccaatgatttgaatgttgagagtatttggagcggaaataaagaagtggacgctttgtttggcggactcatcggcgctatgggaatgtatgaacttaatccaaatggagttcttgaaataatacgggttaatgacggatattatgatttgtttggctcgtcgccaggcagtgtgtattctgatttgggcctaagtttcagcagacttgaggatgaaagcaaagacttgttgctgaacgcttgcagcagagcaaaatatgaaaaccaaataataaatgttgagcttaaaaagtatcatgaagacggtcatttaatgtggctgtcatgcagggtaaaacatattggaaaaagcgacaacagagacttgttttatatattgataaatgatataacagaacaaaagatgcgtgatacttcacggcaaatttctgtttatgcggatatgtttaaatcattttttaatgaaatttttgaaataaatacaattaataaaaccgtaacggttatgtatactgatggcagaattggttttgagacaggtatgaagtttgatattgatacatttatgaatttctgcaggtctaatttggctgatcctaaagattatagttcacttgataaaaatataaagcagtcttttgaaaatgcacctgtttttgtcgatacatataaggttttagatattgatggtaatgctagatggtatgaatgcagggtgctgaaggttaacggttcagatttaggcatatacctttgttgttcagcagatattactgaagagaaaaatattgctttatcaaaagaaaatatgagaatagccgagcatgtaaatgaggaaaagaaacgtttgtttgcggttttgagcaggcttaatatatgtgttttcgagttagatttgaaaaatgacgtttttattatggatgaacagacggaatatgaatttaataactttttcggtgatatttgcagtataagcggatttgttaataagacttttggagaagacaaaaatgcttttgatagctatttgtcaaaagttaaaaacggcatatttgattcaggaataactgtgagaattttaatgagctcaggtgaatatggctggtttaaattagatactgtgcgccaaaccgaaaaaggcgaagttaaaaagattatcggcacgatacaaaaggtagatgaaagtctgacagacgatataggaatcataagagaaaaagaacagcttgtaagtatgctgaattctatgcagtttggagttggaatttttgagtatgattctgatagtttggtaccgaaattttataataaccgtctgagagaattgcttgaaatttttgacggcagtgtttatacgtcgtctccttatgttaatgatttactggtttatatttctaatgtatgcggcaaatatgttaatgataaaaatggtgttaatataaatttgtcagaggaacatgaatataaatgtagagacggttcaaaagcttatgcaaatcttagtataactataattagtttcagcaaaaataaaatggtagtttattgtgttatagatgatataacaaatagaattgaggcggaaaacaaatttaaagagcaaggatatgtaaactcaattttggttgagacgtctgagtatataatattagattataatgctgtaactaaaagtcttactatatccatgccggtgcgtgatggaaaaagaaaagaatacgaatacaaagatattaactctctcagttcggtagggtgggtgtatcctgaatatttggaatcaattgatgaattgctgtttagagaaaattattctgaagacaaaaaggatgacagcatagaacttttagcgaatataggaggatgcggatacagatggcaccaagctgtttttcattatgttcctgacagtgagaataaaatagttagagttatcggcagaatttctgatatacaaattaaaaaagagagagaacttgccttgagcaacgctttaaacgaaagagaaaaattgttggaaaaagccgagatagacagtgttacgggacttctcaacagattaactacagaggagtgtattgaaaataaattgtccaaaataaaatctgagtgtgcgtttgtggtttatgatatagataactacgaagatataaacgcagacctgggacatataaaagcagaagattatttgaaaaaagttgcttcagtgtttgaggacagttttagacatggagatattatcggtagaatggattcggatgtgtttgtagcatttttaactgatgttaaagcaaaggatggagtctataataaggtcggcaaaacaatggcaaaaatttgcttagtttctgaggagtttggatttggcaaaatgggcacagtaagcgcaggaatagcattttctccggataatggcgtggactttatgactctttataaaaaagctaatatggctttgtgcaaggctaaaaaatcaggaggcaattcttatacaatttatagtgaagtttaaatgagctgaaatttttagtgattttgattaaataattgattaagagttgtcgcgtggggatgagtatatgaaaaaattattgtacataattttgatattatttttattcactaatgtcataaatatttttattcctgtttttgctgaagaaatttcctctgcggaggtgtctttttgtgacagggatggatgggtgagcatggttgacggatactccggcgggcagtttaattttagcaggcttcaacagtatccccagccgtttgttaatgaaaacggcagaacgatgtttcctattctttattttgatgagatttttagggatggtttaagttatgatattaatgataatactataacgataacaagaaatattcttgatgttataacgactgtcagtgttactatagatagtaatgttttaattaaaaacggtgaagaaattgttatggataccgtgccaatcagaataggagaaacgatttatattccgctgtggtgggttgctgattatcttggttatggcgttttatggagggattatcaaagtaaatggtggcccggaggaatggttgaatttggacaattgacatccatctttgtttatgtctggaatgaggataaggattcttcaccaaacggattaaggtattcatatacaattggcgaacggtctgatgatatgtctgaaatcaaggcaaatgctgcgtcagattttgaagatgtatttgctgttattaaaagacttcctcaaggagcaacagttttaactacagcgatttatgggcttgatggatataaagtcccatatgatatatataatggaataacaaatgttgtgtttaatggaggctataagggcggatatagtacatattgtctcgatgagattccaccgattattaatagtttgggtgattttacaaatgaatggtattcagaggagctttccgctttaggagaaccggcgctgtatgattcagtcggtcaaatatatcgtttttcatatattccttcattttggaatccgtttgttgttcggatagaaataaacgataatggaacagcagatgtgtgctataaatccggcaacggcgttgcgggtcctcacagcggcgggattttaaaatccgagagtgccgaattaagcagagaagaaactaaagagtttcttgatttattaaatgataaggattattggaatatgccaaaagaagttgagagattaggctgtgacgggtatgatgtagtaattgaaggagtaaagaacggtgtatatcatatagtaaacaggtggtgcccaatggaaaacgatccagccttttatattgaaaaatattttgaaaatttggtaaaagaaaaatttcctgaataaagtaaaaataagtatattttagttttatgatatcaaataaaaaatcagacaataaagagataaagctgtttggtaatttacttatataccatgattttatgagaaactattatatgtttttgataaatatattaattactgcatcgaataatcacgttcattataatgaatttgataaatagatagaatgttaagtatttagtttatttttatactttaataatatacagctataagtaaatgagcggtaaaattattaaattaagggtttaagtatgaaataagcatctgatggctaaatctttcattaatttagataatatatttaatgaagataattcacataagaaataagagtaatttaaatcatattgattgaaatgaataaacataatttacagaatagaaataaaacctcttacagtatgaattgctaagttttttataatcttagtatccatattataagaggttttttgtgactttatatttcaaagctatacatcaaaactgatttgttcaattccctggtcttgctcacggacagttgctcctacagccggaactgtcttggttctgaatctttctatatttttcagtcctgaatctgaagcgggaacggcctttgatactatactgccctttctggaactcattatgttaacgccttgagttgttcgtgtagtttttaagggtatcctttctgtatttacggtaatcgccctgtctttgtctgaaaataaaacaatgtccatttcggtttcggccggaagataaaacatctcaacaagaggcgattttgaagaaaatccgttggcaagtttttttcggttagtttttgtttgatatgacttcagcggaactctggccgcctttccgttttcaaagaagaatactaaatctcctgaaaaatcatcggttgcggacatacccacaatctcttccttttcagtcaatccgacaagattgggtataaactctcccagcaaacttgctttgctgtcaggtacgtcgtaggctttgattttataaacgtctcctgatcttgcaaagaatataatttcactgctgttctgagcttcaatctcctgaatcatagtatcatcgtccttgagccgctgttcaccgctggtgcggagtgatacgagtgagattttctttaaatagccgtgctgtgttctgaaaagtttgacgctgtaattatcaattatttcttcttcgactatgtctttaatctcatcagcagttataatttcagtttttctgtcgcttccatattttttcgctatttgtttcagctgtttttcaatcagtttgtttatttttgttttgctttcaagggtggattttagttcctcaagttctttttttaaggtttctatctcagctatcctttttagaatataatctttattcaaatttctgagtttgatttccgcaacatattctgcctgaacctctgttatcttaaaacccttcataaggttcgggattaccatgctgtcgtcttctgtctcacggacaatttttattgccttgtctatatccaaaagtataagtgagagaccttcaagcagatgcagtttttcacttttcttttgaatatcaaacgctatggctcttttgatacagcttcttctgaatctaagccattcgcaaatcatatcgttaacacccaaaacaataggagaaccttccacaagaatgttaaagttacagccaaaactatcctgtaaaggcgtcattttaaagagcttcagcattagtttgtcagggtctactccacgttttaagtcgatagttattttcagacctttgaggtcggtttcgtcacggatatcagagatttctttgactttccctgacttaactaaatcaactattttgtctatgattacctcaactgtggttgtataaggtatttcttttatatcaatgcaattttggctcttgtcatacttatattttgctctgactttaaaagaacctcgaccggtgcggtaaatttccctgagttctgagtggttataaatcagttctccgcctgtcgggaagtcgggagccagcagtgtgtcaagtatatccgcgtccgggtcatgcataagcataatagtagcttcacaaagctcacgcagattaaaactgcaaatatttgaagccatacccactgcaattccttgatttggatttgccaaaatgcttggaaatgtggccggaagtaaagtcggttctttcatagtaccgtcgtagttgtcaacaaagtcaacggtgtttttgtctaaatctccaaacaattcactgcatacaggatttaattttacctcggtatatctcgaagcggcgtaggccatatctctcgagtaaacacgtccgaagtttccttttgatttgacaagcggcagcagcaaagcgccgttgccgtcagtaagacggaccatggtttcataaatagccgaatcgccatgcggatttagcttcatggtttgtccgactacgtttgcggacttggtaagattgccgtttaaaagccccattttatacatagtataaaggagttttctgtgcgatggtttaagaccgtcaatttccggaatagcacgtgaaattattacgctcatcgcataaggcatatagttttcttccagcgtatctattatttgctgttcttggattatgggttttttcatttaatatattcactccagtattatgatacatctgccatttcgatgtattggtgtccgttttcggcaatgtgttcttttctgccggcaagattatctccgagaagaaggtcaaaggtttcttgagtttttataacatcgcatggggtgactttgattaaccggcgggtttcaggattcatggtggtcagccacatcatatccggttggttttcaccaagtcctttgcttctttgaatagaatatttttgtccttcaagttttgaaagaatctctgatttttcctgctcgttgtatgcgaagtatgttttcttttttgaagttatctcatacaaaggggattcagctatataaacgaaacctttttcaataagtgtaggtactaaccggtaaatcatggtcagaaccaatgttcttatctgatagccgtcaacgtcggcatcggtacagattatcactttgttccatctaagattgtttaaatcaaaagaacttaaatccttattatgttttgattttatctccactccgcagcccaataccctgagcaggtcaacaataacatcgctgttaaatattctgtcatactccgctttaagacagttaagtatctttcctcgaagaggaattattgcctgaaattcgctgtctctgccaagcttacaggcgccgagagccgagtctccctcaactatatagacttcacgtttttcaggatctttgctcctgcagtcaacaaattttttaacgcggttagctacgtcaagattgccgcccagcttcttttttacgtttattcttgttttttctgcggtttcacgacttcgtttattaacaagaacctgattgcatattttgtcagcgtccatcttattctctataaaataaatagccagctgttccctcaaaaattctgtcattgcgtcctgaataaacttgttatttatagcttttttagtttggttttcgtaactagtcatagtggagtaagagttagataccaataccaaactgtcctgaacatcgctgtattgaattttgccctcgcttttattgtatttgttgttggctttgagatactggtcaatagcatatacaaaagcgtttctaacagccttgtccggcgagccgccgtattcaagaaagctggaattatgatagtattcagttgtgctgaactcgttgtcaaaacagaatgcaaagctcatttttaacttatactcagggaggtcctccctgtctcttccgctgcgttcggtttctatataatgaacgccggtgaactctttttcttcagtcagctcttttatataatccactataccgttttcgtatagaaactcaaactcttcaaattcttctttggaaatctcgttttttaaaacaaatttaacaccagaatttacaaccgcctgacgtctcagcgtttctttataaaagtccaacggtatgtcaatatcagtaaatacctttatgtccggcttccagcggattgtggttcctgtgtggcggtgtctgaattttgtctttttcattccgtcgatgttttctccggcttcaaaatgaagctcatatttatatccgtctctgagaacctccacatccatatattcggagctgtattgggtagcgcaggcgcccagcccgttaagacccaaactatattcatagtcgccgccggtattgtttttgtattttccgccggcataaagctcacagaaaacaagttcccagttatattttttctcatgttcattgtagtcgaccgggattccgcggccgaaatcttcaacttcaattgagttatctaaaaatctggtaattattattgtgtcaccaaagccttcacgggcttcgtctatagagttagacaaaatctcaaacattgaatgttcacagccgtcaattccgtctgaaccgaatattacagccgggcgttttctaactctggcagcgccttttagggccctgatgctctcgttgtcatattttttagcgcacatattatattcctccaaacaattcgagttattataccataaaacgaaattattgtaaagcggtcaaatatccaaaaatccgacacaaaaatagaacgccggcagagcgttctatttaataaaattcagtttattttattcagtcatagttctgagagcggctgcttcatgtgcatttgttacagatacgggataacttgtatattaaacattccggcaactataattttaacagttagtttgctgagccagacccggttccgcccgccgggcccgggcggcgcagatatttactttagcagctgattccatatacagttgatgtttttggttattaagcttacaaacagtaagttaaaaaaatggttttagcgctcgggtccggcgagcgcaattgggctaggctgaataccaatgaaagcatcaattgatatggaaaagaagacaaattaaaatataaatattttgtatattaaacattccggtaactataattttaagagttagtttgctgagccagacccggttccgcccgccgagcccgggcggcgcagatatttactttagcagctgattccatataaagttgatgttttggttattctgtttataaacagtaagttaaaaaaatggtttgcgcgctcgggttcggcgagcgcaactggactagaccgcataccaatgaaagcatcaattgatatggaaaagaagataatataaaatgtaaataacttttatattcgacattccgggaactataattctaacagtcagtttgctgagccaggcccggttccgcccgccgggcccgggcggcgcaaatattaactttagttgctgattccatataaagttgatgttttggttattcagtttataaacagtaagtcaaaaaatggtttacgcgctcgggtccggcgagcgcaattgggctaggctgtataccaatgaaagtatcaactgatatggaaaagaagacaatttaaaatataaataactttatattagacatttcggtaactataattttaacagttagtttgctgagccaggtccggttccgcccgccgagcccgggcggcgcagatatttactttaaaatatatagacttcctcaaaatattgacagctttaggtatgttttagaatttagaaataatattataactcgccgcgtctttttattcagacgcggcgtttttgtgtttaaaacaaaaatatttatggtatagttaccgaatttatgcagaataatattattaacaaatatgaagcgtgattaatttaggaaggaatgagatacatggaatatttaagcgaatggacagtatctcctgagaggtggctcaggcttggatatattttgggcgcgtcggaaaacggcggaagaataagcataagcagcgacgaggaggatttgtctaaacttgccgcagacacaatcaaaataggcgttaaatacgcaggctcaaaagtgtataattttggggaacaaaatttgcctataatgcgtcatgccgtcaggttttataaaaccggcttaggcatttttgtcaatacaattaagggcgataacggcaatgtgttaaacgtggatttgttagataaccgcggtattaaagtgccgctcgaaaatttagttaagcgtgaagagttagccaaagctgaaagtcttgtcacttctgatattactatgggaacggttgggcaagaggtaaccttatttgagtttaaaacgcattatatgagacatattatcaacagtataaaaagtgatacgtttaatatgaatatatgtctttcaacaaaatcaaagactatttcagaaattttgaaggtcgttcttgatgacctatactcaaaaatagagcctgaggcgctggaaaagtatgagttcagcggtataataagtgaaaacggagagcagattaatttatataaatcagacggcacagaactttctagagaacaaattttatcagtaatgatttatgttttgctcagagacagttctataagaacctttgtggttccggacactatatcagaatatactgaaacagcgattttgaggcttggcggaaatgtgatcagggtatcgggcggcgactcggagataatggagaaaataatttccagcggaagcagcgaacaaatgctgatgcagtttgacggaatatatgcggcagtaaaaattttagattttctgaatagatacgatattagttttgacagtctgacaatgcatttgccgcagatttttaaagccgaggcagaggttgcctgcggcgacgaaaaacaaatggaaaatataataaaatctttaaaaagacagtttaagaacaacgcaactatattgggcggcagtgatacagacgatgaaaaaggaagtgataataacaaaaaaagtgaaggaattaagattgaaagcaatggaactgtaactattgttttcccgggaagcggaaataatatattaaaaattatttccgagtccgaatctatggaaacggcggaagaaatatcaacgctgtttaaaaataaaataaaaacacttgcaaagagctgaacggtatgttataatgaacacgatttgtgagacaggcgcttgcttgtttcaccgtacggaaccttgcccggttattgccgggcgctttattatatgacagatttttgcatgtcctaagattccgcgtctgtgtttcgctgtcaacggtcgatatttaatggctgcgaataagtttaaggcgtttgtatcttggattacgccgaatcgggtcaattttaaaaagtcaaaatcttttcattaagcctgcaggcggaacggatatggttgcattgcagcggaaaagttttgattcggaatggttttgattgcagatttgaatacaaatgactgaaatagtagtgtttcagggacttggtttatgtcttgagtattttatactgagaattttttagttttgataaaatatatagggtatattttttgtattgtattttagtttgtaacagctgttttggctttagattttctgtagggcgtaatgtgtgttaaaacctttgtctgtgcaggaatttgttgttatattatccggaacgaatcgaataaaagttattacaggaggaaaattttgaagaataataatgatacacgacagaacaacaataagcaagctcagaacgtcgctaacaagatggcgcataaggtcgtggataagatagctaaaatcagcggcgttaatgagaaaacaaacaacaataataatcgaaataaaaataataatagtaacggtaaaaacggaaacagaaacagcaatggaggaaacagaaagaataatacgccgaaacatacagataaaccaatccgtattatacctctcggcggactgaatgaaatcggcaaaaacttaactgtgtttgaatatgaggacgatgctttgatactggactgcggtatggcgtttcctgacgatgatatgctgggtgttgatattgttattcctgatataacgtatcttcataaaatcgcggataggattcgcggcatagttttgacgcatggtcatgaggaccatatcggagctttgccttatgttttaaaagaattttcagttccggtttacggaactagacttactctcggtattttaaaaaataagctcaaagaacatggtatactgaatcaggtaaaacttaatacaattaatgcaggagacaaagttaagcttggagcatttacggctgaatttattcatacaaaccactcaatagccgacgcggtagcaatcgcgcttcatacgcctacaggtataatactccacaccggcgattttaaaatagattcaactcctatagacagcgatatgattgacttggctcgtttcggcgagctgggtaaggaaggtgttttagcgttattgtctgacagcacaaatgctgacaggcccggagtaacatttagtgaaaagtcaatcggaaaaacctttgacaatctgtttgaaaaaggcgagcagaataagcagaggataatagtagccacgtttgcatccaatgtacatagggtgcagcagattataaactccgcggtcaagtataaccgtaaggtcgctgtgtcaggacggagcatggaaaacgtaatatcggcggcaatagagcttgagtatatgcacgtgcctgaaaatacactgattggtttagacgagataaacaagtatcctaaagaacagcttgttgttataacgacaggaagtcagggagagtcaatggctgctctgacaaggatggcgtttaccagtcacaaaaagattaatattgaaccgaatgatttggttatcatttctgcaagccctatacctggaaatgaaaagtctgtagccaatgttgtgaacgagcttttaaagcagggagcagaggttatatatgaaaaacaggctgacgtccatgtttccgggcacgcctgccaggaagagctcaaaatgatattgtctttagttaagccgaaatattttattcctgttcacggagagtaccgtcatctttgcaagcataaaggtcttgctgttcatacgggtatagaccctaaaaatatatttgttatggacttgggtaatgttttagaattgtcgcgctcatctgcaaagatagtgggttctgtgccgtcaggcaaagttttggttgacggattgggtgtgggcgacgttggcaatatcgttcttcgtgacagaaagcatttggctgaagacggtataattatagtggtaatgacaatagaaaaagagagcggcgagtgtgtttcaggacctgatataatatcaagaggttttgtttatgttcgggaatctgaagacttaatggaagagattaagaaacagacaacttctgttgttgaaaattgtttatcaggccgtagttttgactggactactctgaaaacaagagtaaaaaatgatgtcggcaactatctatatgtcaaaacaaaacgcagaccgatgattcttccgataattatggaagtatagaatatttgatatgtaaagttttgcgtattagcccttgacttatttggactcatatagtacaatgaaaattgatatataagaattatatgtcagacagttcattagtaccatcctgtctaaaaataaaactagggcgagttttgaatattacgtaaatctgtgcatattaacataaaattttaattgcattgtttcgtcaataaacaaaagacgctctgtcagagcgtcttttattattataaattatttaaataaaaaggagattcggatatgtatacagtttcgtgtgaaacgcattttgattcagcacattttctattaggttataaaggcggatgtaaaaacattcatgggcacaggtgggttgtcagcgcgtctgtcagcagtgaaaccctgatagaggaaggcggaaaccgaggcatggttatagactttaatgaagtaaagcctgttttaaatgaactcgtagaatgttttgaccacagacttgttgttgagagagatacgcttcgcagtacgactatgcttatgcttgaggaagaagagtttgaggttgcagaggttgatttcagacctacggttgaaaatttttctaagtatttttatgatgaattaaaaaagcgcggcgttcctgtatccaaagtaagagtttatgaaaccccggaatcttatgccgaatactgcgaggactagtatgaatcatgacagccaggcatttaaagtatgcgagaagtttgtaagtataaacggtgagggaattaaagccggacagctttctgtttttgtaaggtttaagggctgcaatcttgactgttcgtattgtgatactaagtgggcaaatgaaaaagacgcggattttgagtctatgtctacagacgagatagttaagtatgttgttgaaacctctgtacagaacgttacattgacaggcggcgagcctcttatacagcccggtatatccgggctgataaaaaacttgaaggaaaacgatcttaatgttgagattgaaacaaacggcgcggttaacttgaagccgttttgttctgacgaaacgcgtcccgattgttttacaatggattataaactcccctcgagcggtatggaagacagtatgctgactgataatttcttttatctgaaagacagtgactgtgttaagtttgtggccggttctgaaaatgatttagaaaaagctctcaaaattatacatgaatatgatttgacaaaccgctgtcatgtttatatcagtcctgtatttgggagtatagaacctgtcaggattgttgagtttatgatagaaaatgttttaaataatgtaaatttgcagattcagatgcataaggttatctggaatccggaagaaaggggagtataaatttggctgagaataagaaaattgacacaaaagccattgaggagcatatcagaggaattttgacggctttgggagacgacccaaaccgtgaaggtcttgccgatactccaaagcgtgtggctagaatgtatgccgaagtttttgacggtatgaattatactaaccatgagatagctcagatgtttaataaaacatttgaggacgatccggattcatatcataactcaaacgatattgttgtggttaaaaatattgaagttttcagtttttgcgagcatcatatggcgcttatgtatgacatgaatgtttcggtggcgtatattccaaacggcagagttataggtctgagcaaaatagccaggatagctgatatggtggcaaaaagactgcagctgcaggagcgtataggttctgatatcgctgaaattatgcaggagattacaggcagtgacgatgtggctgtaataattgaagccagccatagctgtatgacagcgcgcggaattcaaaagccttcggcaaaaaccagaacacgtactatgagaggaaagtttgagagtgacacgagtttagtcactcagcttatgggagagtagagtaggagacgataaaatggataacaaaaaagctttggtgcttttcagcggaggggttgacagcactacagcgcttgcaatggctgtgaaaaagtatggcgctgataagactgcggcgctttctatttcgtatgggcaaaagcattcaaaagaaatagaagcggcgcgtaaaattgccgattattatggtacagaattactagagctggacctttcaaaaatgtttgaatacagcagctgttcgcttctaaagcagaatgaggatgctgatattcctaaagaaagttacgaagaacagctgaaagatactgacggcgagccggtatcaacatatgtaccgtttagaaacggtctttttttagcgtctgctgcaagcatagcgctatcgctggaggctgagataatttattatggagcgcatagcgacgacgcggcgggaagcgcttatccggactgcagtaaagtgtttaatgacgctatgaatactgcaatatatgaaggcagcggacataaaataaagatattggcgccttttgtggaatggaataagaagcaagttgttgctgagggcgtgaaattgggagtgccgtacgaaatgacgtggagctgttacgagggcggagatgagccgtgcggtgagtgcggaacctgccgtgacagaagagaagcatttttggctaacggtcttgatataaaatagaggtgatagatttggagaatattcaaagagagcaggaaggtttgactttgctgggaaatcagaaaacggtatataaagcagattatgctcctgaggttcttgaaacattcgagaacaagcatagagataatgattattgggtaagattcaactgccccgagtttacttcgctttgccctataacaggtcagccggattttgcggaaattattatttcctatgttcctgatgtaagaatggttgaaagcaagtctcttaaattatatttgtttagttttcgtaaccacggtgattttcatgaggactgcgttaacaaaataatgaaggatttgattgagctgatggaccctaaatatatagaagtatttggcaggttcacgccgagaggcggaatctcaattcatccatatgcaaactacggtagacccggaacaaaatgggaacaagtggcttttgaacggcttacacacagagaaatagtataagaaagtttttaattttctgttgtggaaattgaattcagtattataatgtataatagtataagagtttattagataccgtttttaaaaagattttttcttgttatgcgggatatttgatatgagaataaaagtttatgaggttacaatatgaatgaaatatatgcttatcatattgttacagatagacctatggagaaaggtcagcatattattttcaatgatgttaattatagcggcgtttataaaagagtaaatgataaaattcaaattgtgaatgatatttatttacatcctgaaaatatgatgcggatattcttgaatatcataagaaaatagcaatgagaaaattagcattagaaaaagtgcgtaaagatctttattctgattatccatccaggttgagctgttaatatgtttcgaacagtatagaagaatttgaaaaatgagcggagctgtttattgacttaaatataccaacttattttattgttatactgaaaataataggaaacatgtttgtaggcgatgccaataattgttttgaagcaactttatataaagacaaaaatttattgcttgcaaaacggtactggaacaactgtcctaatgaggatggtgttccttcagtaaaggaaatattagtaaatggtgatattaaggttattgaaattataagagaaataaatgcaaatgtataattatagtttaaagcggagccatagtttccgttaataaaaaattttccaagcttttttagtttgatgataggtatataagaataatatcgttattatttgatagcgaatccggattttttattattagtaaaagagttaaaatatactaataatattgaagtgtcaaatgtcttaactagcgtgcgttttaataaaatataattatacttagtctttacgtattgaaatcggcagttatatgtataacaatgaaaaaatcaagtttcagaacttttgatttttaagaatagattatattattgcatatatgaatattatgacggctttttaaagccgtttttattgtgcttaacttatagtcaaaaattttgaaaattaaagtcaaaaaccataacatcactattgtttaaattttatatcaatggtataattatcctaataattattaataaggagataaaaatggatactgtagaaacaaaaaattttattgaatccgggcaggcgattcttggaattgagtttggttcgacaagaataaaagcagttctgattaaccgtaatcatataccaatcgcttcaggcgcacatgactgggaaaacagattggaaaatggaatttggacgtatactcttgatgatatttggtccggggttcagaaatgctatgctgatatgtgtgatgatgtttataaaaaatatggcgcgaaggttgaaaatctttctgctataggtataagcgccatgatgcacgggtatatggcgtttgataaaaatgatgaacttttggtgccattccgtacctggagaaacactatcaccgctgatgcggcaagccgtttgacagaactgtttaatttcaatattccccaaagatggagtattgctcatttgtatcgggcgattcttaatggagaggaacatgtaaatagtataaactacctcacaaccctggccggttatgttcactttgcgctgacaggtgaacgtgttattggtatcggagacgcgtcgggaattttccctgttaattctgaaactaaggattataattcagacatgattaatagttttgataaagtgatttctgaatataattttagctggaagctgtcagatattttgcctaaagtattggttgccggtgaagaggccggagtattgaccgaaaagggagccggaatgcttgacccgacaggtgctctgaaacccggagctcgattctgtccgccggagggtgacgcaggaaccgggatgactgcgacaaacagtgttgcgaaacgtaccgggaatgtttccgcaggaacatctgtgtttgcgatggttgttcttgagaaagaattgtctaaagtatattctgaaattgaccttgttacaaccccgtcaggcgagacggtcggtatgattcactgcaataactgcacttctgatataaacgcctgggtaaatatgtttaaagagtttttgacggctatgggatttaatgcagatatgtccatgctttataaaacgttctttgaggcggctttaaagggagagccggattgcggcggactgcttgcttataactatttttcgggcgagcatataacaggatttgaagagggtagacctattcttgccagaactcctgaaagtaaattcagttttaacaattttgctcgggtttgtttatattctgcgttagctacattaaaaattggattggatataatgctgaacggagagggtgtgaagcttgaaaaaatgcttggtcatggaggattctttaaaactcctgaggtaggacagagaattatgggcgctgcgattgatgtgcctgtaacagtaatgtcgacagcgggagaaggaggagcatgggggatagctttgcttgcagcgtatgtaatagagagaaaagataacgaaagtcttgataagtacttggatgaaaaggtattcgggacagatgccggcactaccattgaaccacgagaagaagatgttttagggtttaataaatttattgaccgatataaaaaaggtatctctattgagaaaacagcagttgaaagtttaaattaattattgatataaatatatttttagtaaaaataatatactaaatattttgatttgttttataaatatagaaataagctgtctattgttggaccaacctcaaaaagttagattaaaagtctgacaattggaaggccggctaatatttgacagcttatttttattaatatataaagtaaataatagcggaaagtcagctgaaaaccggacggaaaaattaaaggtgtttttagtgaacatcggtaggtgtatctgtgaccccactgaaggtaggagtcacagacatagaaggataatcaaaacaagtcactgtatattagcagacagagttttattctgttgcattttttataaatggaaaacccttttggaaaagctgaataattacgttcaggtagtttttgatatattttatttaaataaaataagctgtccatttaggacagcttatttttaaaatttggagcggaagacgagattcgaactcgcgacgttcaccttggcaaggtgacgctctaccactgagccactcccgcatatatacactttttaatgcttaaatattataacatgaagtcagttatctgtcaataccttttacaattttttattatattttatttacgtaaaattattttatactaaaattatagttctaacgatgaaactgattataaatatttaaattaaaattttattaaaaagtctattgaaaacaagtcagtaaaaaatcagcggctccgtaaagagccgttggatgtgaatagtaattttaaccgccgaacaatccttttaccttatcaattatgccttcagcttgattttccaaattttctacaacgcttccgttagggtcaagctttgccttcaccatgtcagctatattttttaattgttcgtccggcaaatcaattccgataagaccttctattgttttgattgggtcggatttaaagttgtccatcaatccatcatcagattgaagtttttcaacggcttctttgactttgtccataatttctgcgatttccataattaaacctccttaaaatttaaataaactgcttataaatatattttaaataaaatgtataaaaatgtcaatataaaattgtatatttaattaaatatttttaatatattcaaaaactattgcagcgatattgatttattaggataaaaataaggatttatttttaatagtataaatggcctttatataaagatttggattttaatacagtatttttttaatatatgttatattaaagatttttaaaaattatagaatatatgaagtgaaacattatgaaatgttcacgctgcgcggaatatgaccggtcactcagcgagtcatgaaaacacgcaatacatcaaactaagtcttattatatgacaactaagttaattattggcgtttatagtttatataatatacatttttgtttaaaagtgtagtcacagacattgaaggcttaaggataagagatacgttggctcacacctacccacaggtaggggcatagtacacctgccgatattcactaaaaatactgtcgccgtataataaaaattaataagtaaattattatacttgaatacacaaaattccattacatctgctgtacatacttagaaaagtttgttatacttttttcgattacaaacttttccgcagctgcgcgccttacgcggcagatttcatctgcattgagtattcatattattgacattgtaggtaaatcaaaacaagttattttgtattacatccaccttttcaggtggagtcacacctatcgaagcttgctatactgcatttttattcaatttttaatttctttatattgtaaacacacttaacgtttctgtatagttttctgtttacttttcagtttattcagaatatgaccggcagttctaactcgcataatattaactgattattgcggaacatggtttaaaatatgtaaatgaagtgaacctgtatggattatttagaggaggtaaattccttttatatagtaaagattgaaaatttattgattaagatttaaaagcaatttcattgaagatttcatgatatattattttttataacaaggataaaagtacataataaataaaaggaatgaattagatattgtacctaattcattccctggaaagctaataaaaatctgtctaaacttttgggttcatttcaaattgaatcctgttctgtaatattattttattttgcattctttttaattttgtcccaatattcttttgcggcctgttcgtttttattatttgcgtattcataatactttttatcttttatattgtcaggtaaatactgctgaacaacataatggtttggataatcatgcggatacagataattctgtcccttctcagcattgccctctccatcgtagtgcttgttttgcagctgtcttggtattgagccggtgtctattgtttctatatcacgaatagcgttgttgattgccatataggccgagttggatttcggagcggttgccagcagtacagcggcttctgccaaaggaattcttgcctcaggaaagcccagcatgagcgcgctgtctacacaagcctttacaatcgtaatcgcctgcggataggccagtcctatgtcttcacaggctataaccataagacggcggcaaatcgactggatatcatcggcctcaaccagccgcgcgagatagtgtaccgctgcgtccgggtcgcttcctctgatagatttttgcagtgcgctcatgacatcgtattgactgtcgccttttttgtcaaacttaaatgactttttttgagtacattgctcagccagctccatggttattttcaggttgccctcgctgtcgggaggcgtatacataaccgccagctccaaagagtttaacgccttgcgaacatctccgccggctttttcggctaggtgacgcataacgccgtcttcgcatattatttttgtatccgggaaatcatcggtttgaattttttcaagcccgcgttctaaagccacagaaatatcatcaggggtcaaaggcttaaactcaaacactgtagagcggctgagtatcgcgttataaatatagaaataaggattttcggttgtgctggctatcaaggtgatttttccgttttcggtgtattcaagcaaagattgctgttgttttttattaaagttctgtatctcatcaagatacaaaagtattccgttctgtccaaacagcccgtcgctctctctaacaatattttttatatccgacacggacgcgtttgttgcgttaaggcgatacagcgccttgtttgatgatttagcggctatattggcaactgtagtcttgcctgtgccggacagtccgtaaaatatcatgttggggatatttccgctctcaataatatttctgagtatgcggttttttcccagtatatgctgctgacccacaacctcgtctaaggttgtgggtctgagtctgtccgctaacggtttattattaagcatagagtgggtgtttgtcacaaagagcctgaacacgttttttaacgtcctctttgtttccttcaaaatctttgataatcaacgaaataagttctgcaacttcaaccatgtcttcctctttaaaaccgcgggtagtaacagccggagttccgagcctgattccgcttgtaacaaacgggctcttagggtcgtttggtatggtgttcttattacaggttattccgacctcatccagcatcttttcaacttctttaccggtcaaatcctgctttatcaggctaaccagcatgagatgattgtcggttccgcctgaaacgatttcaagccctctctcctggagtgcttcagcgagagcggaagcgtttttcttaacctgcttttgatattctttaaaatcgtctgacagggcttctttaaagcatacagcttttgcggcgatcacgtgcataagaggtccgccttgatttcctgggaaaacagctttgtttatcatcggaccatatttttctttgcaaagaatcatgccgcctctaggacctctaagggttttgtgagttgtggtggtaacaaagtccgcataaggtactgggctttggtgtaaacctgccgcaaccaatcctgctatatgcgccatatcaaccatgagataagcgccaacctcgtcggcgatttcacggaagcgtttaaaatctatttctcttgcgtatgcgcttgcgcctgccaatataagtttgggcttgtgttccaaagcaagctcacgaaccttatcatagtcaatgcggtgtgttaccgggtcaactccgtaaggcacaacgttaaaatattttcctgaaatatttaccggtgaaccgtggctgaggtgtccgccctccgcaaggctcatgccgagataagtgtctccgggttccatagctgcaaaaaagacagcaaggtttgcggttgctcctgaatgcggctgaacgttggcaaattcagcgccgaacagttcctttgcgcgctctctggcgaggtcttcaactatatccacatattcacatccgccgtagtaacgcttgcctggatagccttcagcgtacttgtttgtaagcggagtgcccattgcttcgataacagcttcgctgacgaagttttccgaggcaataagctcaattttattgcgttgtctgttgatttctttttcgattgcctcagtaacttcagggtcaaccgattttaggttttcaaattcaaacatcaaatagtcctccaaatatataatttttattatttacaaaataaatgttgaaaaaaacatacattcatattataatgttaaaaatagatttttgcaaggggtattttaaatatgagggaaaaaattgctgataaaaaagagagaatattaaaaataattgagatatttggaaaagtgtacagtgacgcagactgcaccctggaatatgacaatccgattcagttactcatatccacccagcttgcggcgcagtgcactgacaagagggtcaatatagtaacaaaggatttatataagaagtatagggatgtatatgattttgccaatgctgacgagcttgagcttagagaggatattaagtctacaggctttttcaggaacaaggcgaagaatataataggctgctgcaagatgctgatatctgattataacggagaagttccacgtgaaatggaagacttgctgaagcttcccggcgttggtcgaaaaacggcgaacttagtcagaggagattattttgggataccggggatagttgttgacactcatgcgaccaggctttcgaacaggttagggctcacgacaaacaaggacccgaagaagattgaaatggatttattaaagctagtgccggaagaatatcagacgtctttctgtcaccagctagtgtatcatggaagggagtattgtcctgcggcaaggcctaaatgtgatatatgtcctataagcgaattgtgcccaaaagttggcgtatgattttttattcattaaaaaaattatatatctactatgtatatgaccccatataatatatattattttacttataataggtgtttgaaccatttctttttctggcaagaaaaagaaacgcttcacctgtgaccacacctgaaaggtgtgtgtaataaaaagttacttgttttgaataacctacgatgtcaataatatgaatactcaaataaaagaaaaagtgcttgctcgcttaggtcgcctgcggctccaaggggcgctcgcccccgctaatttcatcttgaatctgcgcttcaagatgaaaaagccttgtaactttcccgttgactatgtgtactgccgtgaataaagatattccgagttcttatttctttaattcacaaaaatgctgagggtcagcgagcatcggtagggcgcatttatgcgcctcgttaggtgagctatcatctgaacacgtagtgttcaatatacaattatctttattataactatatacatagtaaataaaaaagcacctgtcattcgtgtttacgtaataacaggtgctttagtcttttttaatatcatttagaatttcaaaaaaataatctaattgacgtggtgacaaggaaaataatatattcaatatcttttgtattttatcatcatctttaatataataattaaagaactcatatggtgtaacttctaaaaattcacaaatataaaagaatccacttaatgatggtaaagaatatccggattcaattttatttatatatccttcactttgaccgataaactcattcatccggatatgagttaatattattagtgcgatttaataagtaatcggttgaggtattgtaaaagtcggcaagtttcactagaaaatgtagaggtatagtttgaaaacctcgctcataacgagagtatacagtttgttgtattcctaaaatatcagcaatatctgtttgttttagtccagcatttatgcgcagaatttttaatcttttcaagtacattttaacatatcctccattaaacttctgagttttaatcttgttcatcaatattaaaataggacgagggcaaattaagattaagcaagtcgccgggcttaacctctaaaatatcggcaatattaaagaaaacttctaaagagaaggaagaagatatattaggagcttcaatagagctaagatgtgaacggctaatatgtgctttctcagcaagttcatgttgtgtatatcccttagcttttctcaaagcagaaatcattaatcctaattcaacgaatcggtctctgttttcaaaaccaacttctttacgcatttttatatcctcctaaaaaattattaaatatgtttttgtatattgaacactgcgtgttcagatggttgctcacctaacgcgcttgctaacgcaagcctaccgatgttcacttaaaaaccagttttttgtgaattaatttaaaaggaaaaccttgcttttttgataattaaatcaattggaactcggtaaatctttattcacggtagtacacaaagtcaacgggaaagtaaacaaggctttttcatcttgaagcgcaggttcaagatgaaattagcgggggcgagcgccccttggagccgtaggcgacctaagcgagcaagcactttttctttggtgaagcgtttctttttcttgcgagaaaaagaaatggttcaaacaccttattatgtaataataaatttttttatatggggtcatatacaaagttaattataataaatatcttctttatatattgaacactgcgtgttcagatgatagctcacctaacgcgcttgctaacgcaagcctaccgatgttcactgaaaaacccgcttttttagtgtaataattaaatggttcaaacactttattatgtaataataaaattttatatgggtcattacaaagtatagttttaaagagctataagctaagttataaaaaagagtattatgaacccaaagtcaaatgtaagtatacattgactgcaaatatattatatcatattgaataggcaattttattccatgaaaaggagtaaattaacaaatgtatgtcaaatgaggaaatattatagtttttatatgtcataaatagtcttacgacaaaataaaaaacaaaaaagggagccatagcggctcccataaaaaattacttctttttatcatacaacccggcgcggtcattgattaccaataacctcatcaaatcctcagtaagccccagcttgccttcctcatcaccttttaaaaatcccttatctaccagcttagttattgtaggaactgcccattcaggcatgttctcatcaatataatcataggtcgctagctgtgctttgatataatctatctctttggtgttgttcaaaatatcagcgccgattgcgtcaataactttatcctgactttcgtcctttttctttaactcttcatattcgctgctcaaaagttcgtcaccgctttctaatttatattctactccaaaatagttgcagatacctttataaattcccactgcacatttatattttccgtcgtcgttggctaaaaacctgttgtcgtcataattgtctataaatgcagtctctaccagtatcgccggcatgtttgtgtgttttataaccgcaaagttcgctgactttactcccctgttgcaaagccctgtctcttttgcaagctccggctgtacacagtcagctaatcttctgcccttagagctgccggtgtaatagtaagtctcgcacccatatgctttcgtgtttgctgagttgcaatggatagaaacaaatatatcagcgtcccagctgttagcggcgttgtatctgcctgcaagactggcgtttaggccttccgctaccgtgtcctttaagctgtttcgactcatcttaacttcaaaaccgtttctttcaagcagaggttttaattttaatgctatttctacagtaacatcctgctctttgagcccgtaacctacggctcctgtgtcgtttccggttgggttgtgtcccgggtcaataaaaatctttgtcatattacttcacctccttcactcttgttctgctctttgagctgttttaaaacttcgtccgcttttacagcgtttggggtgaaactattgttcttccaccaagcccaaacagacgcgccaattgtgaataataggctgaccgtctgatagatatcattatcagcgatgctaaccgcctgcttgccgctcatggccaatatttggttcagcagcgctaccagcagaataatcgtgcgcgctaccgctccagctgttactttgctcattgtttcacctcctcgtttagttcatcaatccgtttgtgcgcagactttgtggactgctccactgctgtcatgcgttccaccaggtcgttgtgcttctctacttctttttcaagcaaacttatcctgtagcttgtgagcctgtttgctgtaagaactcctgttacagaaccaaacatagttccaaacagagccaggcccgcaacaactatttcgggtgtgataaagctcattattttgctcctttacaaatgtattggcgaatacatttatagtatagcaaatatcgcctgccatgaagtgccatgtgttttcgcttgacaaagggcttccggtagagtagaattatcgtaaattgcaaataattctgtcataggatgtgattataatggaaaaaacaccaatggcaatgcgtaaacatgttgctattttcggcgatactaatgttggaaaatccacattgtttaataaacttttaggacaggaggcggctattgtttccgatgtcagcggaacaactaccgaccctgtgaccaaggcgatggagcttatcccttacggacctatcgcacttattgacacggcaggtttgggggacaagtcggttcttggagaacagagagaagccaaaaccctggaaattattaaacgtactgacctaatattatatgttcaagatgtcagttgtgagaacgttttaaatccacgcccgattgacaaaaatattccgactatatttgtttttacaaaatgcgacttggcaaatgctaagacgctgaacagtgccagcgctaaatatccggattcagtgctgatttttgactataacgagaagagcatggatagtttgagaaataagatggttgaggaactgacaaagcaggaaagggacgatgagacgcttatcggaaagcttctgcctaaggacagcagtcttgttttggtctgccctatagacagcgaggctcctaagggcaggctgatacagcctcaggttcagcttatcagggattgtcttgaccacaatatgaaagcatatgtaacaaatgagattacactggcggacgctcttgaagatttaaagcgtgtagatttggttgtcacagattcacaggcgtttaagacggttgataaaattgttcctaaagaaataaaactaacatcgttttctatgcttttggcgtatcagaaaggcaatttcaggcagcttttagacggcgcggcagcgattgacaaacttagcgctgattcaaaggtgctggtgcttgagggctgtactcacaatacttcgcatgaggatataggaaaggttaagatacctgctctgataaagaattatctaggcggtgaaacgcccgaatatgagttttacaccgggtataacctgccgggaagtttttcggattatgaccttattatccagtgcggaatgtgtatggtaaacaaaaaagaagttgtcagccgattaaaagaggcggaggaagcaagcgtcccggtgaccaactatgggattgcgctggctaagctaagcggtattttggatagggcatgtgaaatttttgcagaggaagattaatgtgttatgaaatttacaaaaagtgaagctcttgagattataaaacagaataaagaagtcttatcggaggaactcagagaaaaatccctcgccgtgtgcagggagaatttcggtaactcggtatatgtcagagggcttatagagtttactaattattgcaggaacaactgcaagtattgcggcattagagccggcaacagaaatgttcaccgttataggctcacaagggatgaaattttggattgctgccgcgtcggcgcaggtttagggtttaagacatatgttcttcaggggggagaggacccaggattttcggataatgagctttgttcaattgtttcggaaatcaagacggagtttcctgattcggcggttactctatcagttggcgagcgttcgaaagatgtatatagggagttttttaaggccggggcggacaggtttttgctgagacatgaaacctcggttgaagagcattacagtatgctccatccgtctgatttaagtttaaaaaacagaaaaagatgtctttatgatttaaaagatatagggtttcaggttggggcagggtttatggtaggctcgccgtttcagaaagacgaatatttggctgaggacattatgtttttgcaggagcttgagccgcatatggtggggataggtccgtttataccccataaggatacggaatttaaagatttccctcagggaacattaaatatgactttagtaatgctgtgtattacaagattagctctgccgaaagtgctgctgccgtctactactgcgctggggacaatttctccgaccggcagagaagacggtctgcgctgcggcgctaacgttgttatgccgaatttgtcacctataggcgtaaggcgggattattcgttatatgacggaaagatatgtatgggcgacgaagcggctgagtgtataaaatgtttgggagctagagtggagacagtgggatgcaggctggatttctcgcggggcgacagtccgttgatatagggattaaaacaaaacttcagcattatacaagaatagaatgtgcggctgatgttaaaattgatttgacgaaaaaagacaaaaataaaaaacacctctgcggtgtttttatttttataaaattatgtttgccaaagcctcgcagtgtttataaaagcttcgcaaaacaccggctttgtgaaactttaaattcaagactaaaccgctctgtcaaccttgcctgatcttatgcatctggtacaagcgtaaacttttttaggagtaccatcgacaatagctctgacacgtctaacgtttggtttccaaaccttatttgatctacggtgtgagtgagatactttgataccaaagctaacgccctttccgcaaatttcgcactttgccatatatatacacctccttaatagtttaaaaattaactcaactcgaaatattataacagaaactattttataatgcaagtactttttcaaaaaaaatttacattttatttatatatttttatattcattactttaaaactccgcctgtgagttcttataattctgcaaaatatcttatttattaaactttagtaagctgatgacgctatgttatcagcttttattatttaaagttatattgatttacttaatataaataatgtttataaagttataaagcaaattatttagctgttaatttaaacagataaagcgaaaatgttatttttactaaataataaaaatattttaattatatattgtataaatcgttaaagtgtgctataatgtcagtaaggtatttcaggtaaaatataccaaatttaaaaggaggagtacatatgaaaagaaaaattgcagtaatcattttgtgcgtcgtttttttggttggaacattttacgtttttgccagtgacgcattaattaatcaagaggataaaacagatgctgcggaaattgcagaaactgttgaacctgctgaatctgctgaacctgaatccacagcggaaatagtgatcgaaacatctcctgagccggattcggaaactgctgaaccgactgcttctgcggctgcggaggaagaggatttgagccgtcaggccggagagaatgaaactgagacaacagcgtcacagtatccatcaaatttttatgagttagctcaggttttaaatagtagagatataaacactgtaggcgtctgcgatattttaacaagttatttatatctgcgggacgtatacggtctcagtaatcaggagcttgaatacatcgcaggactgattatcggcggcgctgaaccgagcgacattatggaagctgcatatttttggctggatacctgcgaggatatatcaattattgaacagatatacaataagaaaagtgaatatgaaggcggtaagttttgggttgaaaacgcttacaacgacgtgactgaatatatacatggcgagctgtctgtggacgacgttaatcattatcttgaggcgggtgcagccgctgttgatatacagaatgctaatgttttgagcagaaggggagtttataccattcagcagatactggacagaatcatcggcggcgaaacaatagtagatgttatgaatgacgtttatgggactaatataactcagcctgtcagtttatttgggcttaatgaaaatgaggaagcggatgaaaatattttagacagtaaagaattggccgggcttgaaaataagcagattgaggaatctgccgaagaaatattgtctgacagcggcgtttcggaaagactttctaagaaaagaaatgagaaaaacgcagggcttgtagaacagcttgtaattaacggaatcatcccgggtagaattgatgaggatttgggggtgatttttgatgagtaagctgaaatatcttttgtttatttctgtactgattgtaagctgctttagtatttcgtgttatgcttcaacatccgattcgctttatgagcagtctttggttgaaagcatgatagcccagaacggttcgaattatgaaagtccgtttatagccgcgggcggcaatgtggaattaagcgacggaaatgttaacgtaaatgaggttgatttgagcctgccggggaaaaatggtatggacgttaatatcaggcgtattcattatgttaacggcaaaccgggcagctactacggagtaagcactaatggaagtgtggcaacaagtccgatgtatttatataattacgttttaaacggagtttcaaaaaccgcatatgtggcttttgataaggaagaaaatttaacagatgagttttatacaacatcttcattgctgggttcaaatatgagcactgatactcatggaacaaaatactacgaatattccagtataaaaagtgcttctggaatattaatgactagggataagaataaaccttcggttcaaaattatcagctgtcgaatgaagtgtttgcgtatatgggcaaaagttccgatgttgaaattggttatggctggtatgtcgcgatgccgcagataagccaagtaaatgtttcggggagcagttatataaaaagatatacctatctgtttgaggatgaaaacggacagacgatgaattttacatatgagtttgaccttgagggaacaaagtgggtgtttgacccggaaagctgcaatgtgtcggcgcctgacagccagtacaacgctcaagtttacagcgacaatcagacgcatgctttgggatttcaatacgatgttgttataacagacggagacggaaaatcatattactttttaaaggggataaataaaaattgtcttcctgccgccattatagacaggtacggaaacattgtccgctatgccgcaaacagcagcggcgttgctgtgacagatactttcggcagaaacattcaggtatcgtcatcaggtataaccgttaccaaaggcagctatgtcaaaagcgttgagtatcgactggtaaggtcaaatgacacaaacagagacccatcggggctgctcagctgtttttcaaaatattctttgcaggtgagaaaatataatggctcgggatatgagactacagaatatgtgtcacacaaaagctcaattcaatttataagcaaagaggtttactattatgataaaatcgaaaagataatatatccgacaaacgcttcggtggaatatgagtatgagacaacgccgacagtgaaaaagttctcttcaagcacaggacggtataaaatttcacataaggattatcatattaaaaaagaaattgcttatgaagacgggtcagaaaagtattcaaaaacatacagcttctatcagtacatacaaaatgccgctacggtgccaggagataaggagcgctatgtgacagttaatgaaacttatgacgacggttcaagtaagagcatgaattataattatgattatgccggaagactatatgagataaaaggaagtattgatggcaaggtgtataacgagcagtatacatattccagtaattccaataaagatttgagcagtcttggttcatcaacgatgcttgcactgagaaaagcgaatatgcaaagcgttataactacctatggcgggaatatcataaatgttacgtataataactataataatagaaatcagccgacatattcacttaatggtgagaaagaaacaacttatacttatgatgacagttttgggcttctgctgacgaagaattataaaaaggatgacagtacgcccataagtatacaaaacagtaaaacttcagacggaaagagtatagcaagctctaaaatttatgaaaataatgcagagaagtcaacgacttcatatacatataacagtgacggtacaatagcaagtcagacagtaactccgtcagtgggggcgcaggtgacaaccgtatatagctatacatacaatccggacggctcatatagattaacatcaaccgtcaataatgtgtctgatactgacgggaataattcgtcggtgactactgttcagaattatgactggctgggaaatctagtatccgcaaccgaccctaacggaaatactttctcatatcagtatgacggtttggggcgtttagtaaagcagataaacccggacggaacataccagacagctagctataatatagcagacaacagcgtaacggtaacggatgagaatgggaatataacaactcaggactatactccttttggatatttggataaaatatatttggataataatcagaacaacatagccgcccaatatacatatgacaatcacggaagaaagacgagcgagactgcataccaaagcataggcggaaaaaaggtaactgaaaattatacgtatgaccagtttgacagagtggtatcacaaacaagcaaagaggataatactgcgctggacacagtaggatatgagtatagttacggagacggtttttcaaaaagtgaatctaatattacaataacggttccgtcaagcgcaaaaaaacttttggcggtatttcataacacatcggtatcagcaagttcagcagtcagtgttaaaaacggaagcactgtatactttgccgactcggtttcggcaaaaggagcgcgctcggtattggtggatgtgtcaaatctgtcaactgtatcgcttaataaaatgtacgggaaaatatattataaatatttgactgatgatgatttatcaaagaatataacactgctgggaggagccagccaaacggtaaaggccacatacacaggagacagcacatatgtaaagccaacagttgagacagtgctggacggtttgggaaacaaggcgtcggagacgtactataagcatggaacgagtacggtgctgaataaaaacacatataagtatgactatatgggaaacgtcctggagacaaaaggcggcagaacctatactgaaaacctgggagactatacgtcgaaagcggaatatgattatatgggaaatccgacaaaaacctacagaaccgacggaagctatatgaccgccgcatatgacggatacggaaatgtattgagccaaactgactatatgggaaacacaaccacaatggaatacgacaggctgggaagagcgataaaggcagcggcgccgtttaatggttcagaaaagagcaaaaccctgacatactatgacggaaacggaaatgttgtaaagaccaaacagcagaacaatgagcccgggaaagcggagagctatgcggtaacggagtatgaatacgatagcagaaacagattggtgacggtaaaacagaatgacggaaccagggatatatatactcaatatgcgtacgacaatgcaggaaatatggtgaagacagtaacaggacagacaagcaaaatagctaatctgtacgggacactgccgggtgcagcggccagtcagacatatgagtatgacagattcggaaacgtgataaaggcaaccgacggactgggaaaaagcagtacggcagcgtataatctaatgggattgccggtgacagagacggacagaaacggaaacgtaaagacaatgacctacaacgcctacggaagtccgctgacagtgagcgtaacaaatggagagacaataacaaatacatacagcaaaaacaatctgctgataagcgccaaacagggaagcagcacggtgtcgtacacgtatgacgactatggatatgtaaagacggagaacagcaacggtatagtaaacacatacacaaacgatgttgaaggaaatagaaggaactatacccaaaaagagggaacaaatacatatattaatgcgtcatatacatatgacaaactaagcagaatgacgaatgtaaattttggaaacggaataagcgcgggatatacatataacgcaaataatcaagtgtcaaaggaaacgagaggaagtctgacaacgaattatgcgtatagagaaagcggacaattgtcggtgatgacaacaacaaacggaagttggacgcagggatatatgtatgattacaatttgtcaggaaatcagatattaaaaagaagcatagattcagagaataatatatttgatgacacaacatatacatatgataacttagggcagctgttgagcgagacgtcacctaattactatgcagtatatatgtatgatactagaggaaacaggagtaaaataaaagaaggaaatagttattggaagaattatacgtatgacgccaataatagaattataagaacaacacagcaggcagatgatagtaatgatatctatgagaattatacgtatgatgcaaatggaaattgtctgaccatgagaaggtcatattattgtgatgatggagataattcaggagaaacgggatatgatgaatttaaatatggatatgatgcgtataacagacaaataagttattataattatgaagtagattatgtaggagactatgaggatgagacaacagcaacgtatacatatgacgcgataggaaggagagcaagcaaaaaggtagacggagcgacgacaacgcacagatgggacggaagcagcatagtaggagacagcggaacaggagcggcaacgtattatagaggaataaatataatagcacagaacaagaacaacgcagtgaactactatgtatatgacggacatgggaatacagtaacactgacggacgcaaacggggcgacaatatccaaatgtgactatagtgcgtatgggaatagaacgtcaataaagagttatataaatacgccgttcaaatactgcggagaataccaggacaacgaaagcggaatggtatatctgcgaaacaggtattataaaataaacgaaggccgcttcacgcaggaagacccggcaaaagacggactgaactggtacgcatactgcggtaataatcctgtgaactttgttgacccaagcgggctggtaaatgttgaggatcaagatcctatacaggattattgttcaaatcaaggggaaataacaggtcaggaaagaaaaaatataaatagtgcgattttagcttataaaaatggatttttatctaagaatgacatgctaaataatgttgcgcaaaatggtggagtagtaaaaaaatcttataagggaaaagcagttatagtagaaatgaaaggaaacactttgaatataacaatatatgcagatataacaggaataaaaagtaaatcgggcaaagatataactagagaatataaagaaggtttgggacaaatcatgaaagagggtatagaagaaaattggtctggtgaagtagatggggtatatattaaagtgaatgttattatgggtgcaagcaataccaatagggtaatagaaatcaacttaaatgaatcaagcggtgcagccggttcaactggtaaccatatgaaaggttctgctgatataaattttgttaatccacttaacataaatgaggtttccgctaatgaaaaagctcattatattgatagatttcaaagaacttgtgaacatgaaatagtaggtcatgtagtagctaatttagttgatacttatacgggaggtgtaaattctacgaaaccattaaatcaagaaagtatagcttcggttatgaatgaacaagcaccttatcatcctcaaaaagtagatttagcttttttattatttaattataaaagaagcaggtttggaagtcaaatacaatatggcgattatcctgatatattagataaatatgccccgggttggaaatatgaatgagaggagaaaaaatatgaaatataaaaaagtgttttatagtgtgattgttttatgtgtaatatcatttggagtgaatgtaaatgttagaggaaatgaaagcggtaacagcggtaatataaatgaaataaatagtagatatgaaataataaatttaagtgaaccgataacggacgcaaaagattattggctttatgattgtgacaatgatggcgtttggataggtgtatataatcataaagatgattgtgtatatgattactttataggatatgatggaaataactatggaatacctactttgtttcatgatggcattgcaaaagtgaggcaaaacgataaatttggatatataaatacaaattatgaatggattttgcctcctgtttatgatagttatagaattagtgagtttgcagatggatatggtgccgcaacaaaagatgatacatacaacagcaaatatatagttgacaataatggcaatattaaacatttcttatgtcctgatatggaacaacagtttatcggaggtaaagagataggaactcagtatgttgttgataaaaatcaaaaagtaaatttaattcatacagaggatatgataaaagatttaaatccagaaaactataacagatattggggatatgagcagtttgggggaactacgctatatcaagtaaatattgccgagtctgaggattcttcaactataaataaagtatattatatgtttggagatgatggtctattaaaatataaatatgaagtaagctcgcttgaaaacaatcctgatatatactccggttattataatccaataatactgaataatgggaatgttatatttcttgataaagataaagaaaataaaaattatacgaaacatatacacatttctagatttggcaatgtaattggagaaaaaagtttaaaatatccaatagttaattttgaaaaccaacttttatatagttacggagataatatgctggaataccatggagagtttttaggaatggattttgaaccgttattttctttaaagcaagaatataatggatacagccttttaagtacggaatcatatttaccatcatcggagattaaagataaaatatgggaagataaagaaagaaatataatagtatattttttaggtaaaaagcatgaggaaccaaattataataaatctgcagatatatatcaactattggttgtatatacaaatgaaacagaaataaatcacataccggttgcggttgatgaaggaaggataccaatatacgagaaacctgaaagaataacaacatatttaaacaatgaacaacttaactttgatatcctgccgataacagaaaacgatagaacattggcaccaatgagagcaatattcgaagcattgggagcagaagtagaatgggaaaatgaaacacaaactgcaacagcaacgaaagacgggataatagtatcaatgacaattgacagtaatagaatgctaaaaaatggagaagaaatagaattggatgtacctgcaagattagtggaagacagcagaacattagtgccattaagagcaatatcagaagcattcggctgtcagatagaatgggacgaagaattacaaagagtagatatttataaaaactaaaattgtcatggagagcgtaaattattacgctctccgggaatccccaccaaaagccggacaagcatgcgcataaaaaactgaaacggagtaaaaaacaccggaaagtttttgtatatataaaaataactaactatttaaaataaaatccattaaacaccttaaatttaaatagttagagaatacatataactccgtttcagttttttatgcgtacagagaaagtggacagctgtcggtgatgacaacaacaaacggaagctggacgcagggatatatgtatgattacaatttgtcaggaaatcagatattaaaaagaagcatagattcagagaataatatatttgatgacacaacatatacatatgataatttgggtcaactgttgagcgagacgtcacctaattactacgcagcatatatgtatgatacgagaggaaacaggagtaaaataaaagaaggaaatagttattggaagaattatacgtatgatgcaaataatagaattacaagaacaacacagcaggcagatgatagtaatgatatctatgagaattatacgtatgatgcaaatggaaattgtctgaccatgagaaggtcatattattgtgatgatggagataattcaggagaaacgggatatgatgaatttaaatatggatatgatgcgtataacagacaaacaagttattataattatgaagtagattatgtaggagactatgaggatgagacaacagcaacgtatacatatgacgcgataggaaggagagcaagcaaaaaggtagacggagcgacgacaacgcacagatgggacggaagcagcatagtaggagacagcggaacaggagcggcaacgtattataggggaataaatataatagcgcagaataagaacaacgcagtgaactactatgtatatgacggacacggtaacacagtaacactgacggacgcaaacggggcgacggtatccaaatgtgactatagtgcgtatgggaatagaacgtcaataaagagttatataaatacgccgttcaaatactgcggagaataccaggataacgaaagcggaatggtatatctgagaaacaggtattacaaaataaacgaaggccgcttcacgcaggaagacccggcaaaagacggactgaactggtatgcatactgcggtaataatcctgtaaactttgttgacccaagcgggctggtaaatgttgaggatgaagatcctatacaggattattgttcaaatcaaggtgaagttgttggacaggaaagaataaatattaatagcgcaattcatgcttatcaagatggagttttgtcctatgaggatatgttaaaaaatgttgtactcaatggtggaaccataaaggaagaaaagaaacttgattctattactattgtccaatcggggaaaaattataatataaccataaatgcttacttatttggtgaaatgtctaataaaacttatgacggacgtagtgtagatagtatattaaaatccggtgtaaataagtattggagtggaaatgtgaatggatataatatcactactaatttagttttttcagatcctaatatatatcaagtagttaaaatagaaataagaaagggactaattgatcaatctgataatcaaggaagttctgtttgtatatattgttcagaaaacggcaatgaattgatgttaactgacacaatacctttgtatgcggaaacgccaacgtatgttgacgcaatagaaaaagctatagctcatgaaatgggacatagggtttttaatataggggatcactatagaaagaaaggaattcctgaatatgtacaattgcctagtaaagtaaaatcaattatgaactaagctttccaaacgcctacgcaagcacaacaaatggatttagaatatgtaatatattcaataaattttttaaatggtcggccatttcattatacaacgcatccatttatattggaaaagtattatcctaattggagaaatatgggtagatgagtaaaccttaaaaattagtttatttatagaaatggagaaaaattatgaagtatttgagaaaatttgttattttaatatgtgtttgttttttatttattggttacataaatgtaatggcaaaagaaaattataataaatataaaatagatgatagtaataatcaaatgtttatattgtcggatgaatttaaggagtcgaataatataaatattgagattataaatatggacgaatatggagttatgttggctatttcaaaagtagataataagaactataatatttttattgattataaaggagatgtatacaaaaatccaatattatttaaagatgatatagcggttatagagattgaaaataaattcggttatataaataagaattatgaatggatagtgccgccgatatatgattatatggaatcttttaataatgggtatgggatagcacaaagaaataatatgtattacataatagatgtaaatggtcaaattaaatatagtacccagaatacaatttatcaatttgatgatggatacgcattaatgagttgggtggataatgatggtacaaggaattatgcaagcattgatctggatttaaatataaattatattagtgaaatgagtggttattatatttttatacgaaagtctaattcagatcgtcgtgtaattaatagaaacaataatgctattttgggatataatccaacaacaaatacctatactttgtttgatattagtggggaaataatttgtacaaaaactatagatcaaaaatatacttattatacatcaggggtgtgtttatataacaggagtgcaataatatgtgcaaaagattcaaatctaaattgcataaattatctattaacggaggacggtaaggttgtggaaaatacaaacggaacagatattccgtttaataaaaacggagcttttagttttagaaataaatatataataacatattatcatgacatctatgacatgaatttgaaattgttgggtgaattatattttgatgaaaattttgatgatatcattacttatggttataaagatatatttacattcttaccgattagtttgactgaaaatacggattcatggaggtataatatgagtgctgataagttatattttgtcattgatgaaaaaatacagaaaaaagttaatctagttgatttacaaaagataaaggaacctttgaaaaataatcaaattacagtatatataaacaatgagcagttaaattttgatatatatcctataacagaaaaagacagaacattagtgccaatgagagcaatatttgaagcgttgggagcagaagtagaatgggaaaatgaaacacaaacggcaacagcaacaaaagatggaataacagtgtcggtgacaattgacagtgataggatgctaaaaaatggagaagaaatagaactggatgtacctgcaagattagtagaagacagcaggacattggtgccattgagagcaatatcagaagcattcggctgtcaggtggaatgggacgaagaattgcaaagggtagatatttattcaaactaaaattgttgcggagggcgtaaatcattacgccctccggtaactccgaaaagttggacaagcatacgcataaaaaactgaaatggagtaaaaacatcggaaagtttttaaatatataaaattaattaactatttgaaataaaaatccatcaaatacttcctttttaaatagttaagaaatacatataactccgtttcagttttttatgcgtaagtaagtatattaaaaacaattaagtgtagaagcgacaaactaaaaataaaaagttatatagaaaaacaatatggagaagcgtttgaaatgacaatagaagatgtttttagagctgaaaaatcttatgaaacaagaagtaaaaatacagatttagtgataggaacaaatggatatggtcaatttccgtatgatttgacagtaacaagtaattctgttttttcaccaaaatcagatcaggtgatattactttaaattgtactaaaccgacgagaattgttgataatgattttacggaagaggaaattcaaatccaatatgattatgcagtaacaaattgtataagaaacttaaaaaatgtagcggctcatgaatttggtcatggtggttttaaattatatgatatttattttggcagtaaacctttcaataaagggaaacctataaaaaatacggggagtattatgtcgaatggaagttttgcacaaccagtggattttgctatgatgttatataactataaaaataatggttttaataattggcttgcattttcggatcatgaagatatattaaataaatatgctcctggctgggagtatataaaatagaaagattgggtgataaaaatgaaattattaaaaaaaatacttattattcttataccattatgtttgattgtaaatatggtagctttttcaagcattgaaaatgattataatgaacataatgaaacatttgcaaataaaattgatagcgaatatcatgtaattaaacttaaagaggccataaaatatgatgattgtattttagatgctcaagctgtaaatatttattatgcagatgaaaatggaatatggatagatttttacggaatagacgataataaatggaatgtggcgttagtcggatatgatggttcaataaggtattataataaaaatgatgatttattgaatggtttgttttatgatggtatagcaagggtaaagatagatgataaatatggatatataaacgagtcatataattgggttgttccgccaatatacaactttgctacaatttttaaagatggtatggggtttgctagcaaagagaataattatggagagacagaaaatttcttttttgataatacaggtaatgttatttttagtacaaaaggtgattttgtaaaatatcattcaagtatagcaacggaatatgataaagaggaaaattgtgaggtattttcaaatggttatgctgaatacaatctaaatggcaaaaaatatataattgataaggatttggttccttgtcaaaagaacaagatagaaatgcctgacagcggagaattaataggatatgattccaattcatcaataaaagtttatacctttttatcaaaccaaaacgataaatttgacaaaataaatacatatatgtatggaagggataatgaacttaaatatactaatacttttataattgaacatggaacgtattataaaaattttagaatattggatagtggtatggttttattcgacgggtatttaaacgaaaatcagaataatactggatttatagaactagtttctccagatgggcaggttattggtaggaaagagttaaaacaatatatacaaggcaataatttgtgtgacaaatattttagttatggtgagaatttacttagacttgaaaatgttttttataatagagagttaaccgaaattggggagatattgttatatgaaaatagtacagacgatgaaagtactgtatctgaatttattggtggtaataataacattgtatgttattttactggtcatacaaaattaaagcaaaataatacagtatattatgctggagaattaaatactatatttgttcttaattataaaactgtaaagttaaacaattctcctaaatttgtaaatcaggataaaatacctcaatatgaaagtagcaatgaaataaaagtatatttaaacaataagcagttaaattttgatacatatcctataacagaaaaagacagaacattggtgccaatgcgagcaatatttgaagcgttgggagcagaagtagaatgggaaaatgaaacgcaaacggcaacagcaacaaaggatggaataacagtgtcggtgacaattgacagtaataaaatgcagaaaaatggagaagaaatagaactggatgttcctgcaagattagtggaagacagcagaacattagtgccattaagagcggtatcagaagcatttggctgtcaggtagaatgggacgaagaattgcagagagttgatatttatacaaagtaaaattgttatggagagcgtaaattattacgctctccggcaatcccccaaaaagcaggacaagcgtacgcataaaaaactgaaacggagtaaaaaacaccggaaagtttttgaatatataaaaatatttaattatttaaaataaaatccattaaacaccttaaaattaaatagttaaaaagtacatatagctccgtttcagttttttatgcgtatagagaaagcggacagttgtaggtgatgacaacaacaaacggaagctggacgcagggatatatgtatgattacaatttgtcaggaaatcagatattaaaaagaagcatagattcagagaacaatatatttgatgacacaacatatacatatgataacttagggcagctgttgaccgagacgtcacctaattactacgcaacatatatgtatgacacaagaggaaatataaagcagaagaaagaaggagacgataatccaacatattatagttatgacaaaaacaatagattgacattttcatcaaatgaatatgggttatatacatttgaagattctatatatgaatatgatggaaatggaaatcgtgtaaagacgagaagaaattattatgatgatggaggagacgaatcggtagatataggatatgacgaatttaaatatggatatgatgcgtataacagacaaacaagttattataattatgaagtagattatgtaggagactatgaggatgagacaacagcaacgtatacatatgacgcgataggaaggagagcaagcaaaaaggtagacggagcgacaacaacgcacagatgggacggaagcagcatagtaggagacagcggaacaggagcggcaacgtattataggggaataaatataatagcgcagaataagaacaacgcagtgaactactatgtatatgacggacacggtaacacagtaacactgacggacgcaaacggggcgacaatatccaaatgtgactatagtgcgtatgggaatagaacgtcaataaagagttatataaatacgccgttcaaatactgcggagaatatcaggacaacgaaagcggaatggtatatctgagaaacaggtattataaaataaacgaaggccgcttcacgcaggaagacccggcaaaagacggactaaattggtacgcatactgcggtaataatcctgtgaacttcgttgacccaagcgggttggaatctggatattggtaaaaggataattcaattttagatgaatcgttgcaatatacagaacaagaacaaaaaaatatggattaggctattcaggcatataaggatggtttcttatctgaagatgatttaattgataatataataagtaataatggtattattcctagtgtaggatatgaaataaatgggaataatgtaaatataattattagagctgaattttctggtgatagatgtgacgaagtgtttgaaagtacaggtaaaacatataaacaattatgcattgaaggcattgaagaatattggtcaggagaggttgatggaattactataaaaacgaaagttactgaatttgacaaaaataaatgtaaggttgaagaatataaacttttaagctattagagtatggtagaagaagctggagaaggtagagaaaattcaggatatgtttctcataaacctggtaaaaaaacatacatagtagattttgattatcataaatcccaatttgttaatagatttacagaatatgatcggtatcaatatgtttgtgttcatgaaaccggtcatggattgagacttggagatttacatgacaaaggaaagtattcagcttgtgttgactcaataatgtggggtaatgcgaattatgcagtttcaaacaaatctcttgatttaaggatgttattagtatcagtatcaaataaatttaataaagatgtagagtatagtagttatcctgatataatgtataaatattcaccagattggaggaagtaaaatgaaatgtatacgttttgtaagtataataattgtagtattaatgatgtctctaacttgtttttgttctgaaaatttaagttataacgacgaaataaaagtctacataaataataatgaaataaaccttgatatgtatccgtttatagaagatgacagaactatggttcctatgcgggggatttttgaagccttagatgcagacgttgattgggatgagaacaatcaaacagttatagccacaaaaaataatattactatatccgtaacaataaacagtgatataatgataaaaaataaagaatctataaaattagatgttcctgcaaggttagtagatgactgcagaacctatgttcctcttagagcagtctcggaagcttttgggtgtatggttaaatgggatgatgaatattcaattgttgatatcattgatgactcaaatctgcctgataagtggcatgttggagacatatcttgtgatgagtggtttggatattactattttaatagagaagatatgcctgagaatgaatatggatatttttctgactgtagtaaattttctgatggtctagctgcagcgagtcaaagtaataaatattcctcaaaaaaatattatggctatattaacgactatggatattttgtaatacctgatatatatacagaagcaggtgattttcagaatgggattgcaatagtaaaatctgatttttatccatatccatatagaataaacacaaagggagaatgtgttgataatatagaattaaaaaagaataatgaattcaataataatcttgaagtatttgaagataaaggtttatatggatataaagatacagatagaaatattgtaattgaagcatcatacactgaggcgaataatttttctgatgggttagcattggtaaagtcaagagatgtaatttgtacggggactgaccgatttgatggatatggttatataaatgtcaaaggagagctagttataccatttgaatattattatatgtcgacagattttaaggatggaagcgcatgtgtttatgatacggtagataatgtttttagagcatggtatattgataaatcaggtaataagatgtttggcgataaaacatttgtaagcggtaataatttttctgaaggtttagcggttgttcaaacgaaaggaaatttacccagaccgctttttgcaagttttgatgaaaaagatgagttcacatatattaataaatccggagaatatgcaacagagaacaggtatgattatgctgaatcgtttgttaatggcagagcaaaagttgttattgacggaaaagagaggtatataaataataaatttcaatttattgattagttattttaataataggcaaatatttggctattagaaaatatggagtgtagaattaaaaagatggacttttacataaactgaaaaattccggagggcgtattgatttacgccctccggtaactccaaaaagttggacaagcatacgaataaaaaactgaaacggagtaaaaaacactggaaagtttttgaatataaaaaataattaaatatttaaaataaaaatccattaaatacttccttttttaaatggttaagagatacatataactccgttttagttttttattcgtaagtaagtatattaaaaacaatttagtgtaaaagtgacaaaaataaaaataatatagaaaaacaatatggagaagcgtttgcaatgacaatagaagacgcttttagagctgaaaagtcttatgaaacaagaagcgaaaatacagatttagtaataggaacaaatggatatggtcaatttacgtatgatttgacagtaacaagtaattctgttttttcaacaaaatcagatatgggtgatttaaaagaaaaaaggataggtgattatgtatcagcagcaatattgagaagcagaggacccaacatagtagaatatttattagatgtatataactaaagtattatgtaactaaaaaataaaaaggatgtgtaaaaaatgaaaagatcaataggatgtatgattgcaatatgtatattattatcaagtataacagtaagtgcacaaataggtcaattttgggctgatggtgattttaaaataatatgtgatttgggaatagtaccaaaagaatatagagaaaaagatataaatgatttaataactagggcagaggttgttgatacactctcatgtttggtctatattgataatgacttagaacccaggaataatcaagagagtatatgttcaacacttggatgggaatttgaagatattgaaaatggtactgaggaatgtacaatagtagtttggggagtagaaggtagtatatttaaaggagatatagaaaatggattacataaagctaatattaaagatttagctacatatagagatgtaatagttatggcattaaggactttaaatagtgaacttctttataaaggtgatttatcagattcattttatttagatttagctgaagaatgtaggatgataaactatgggaatttaatttcatcatcgtcagtatttattgaaccggaagagttagacgataatataacatgggaagaattttcaaaaatagtgagaactattttatacataccaagatttcagactggctactggggatatgtaaataggtattacatagatgattggaaaaaaggctatagaggataaaggttcctaataaaataataaattaagataactttaaaaaataatgtttagtaagtaaattttgagggcgtaaattaatttacgccctccggtaaaccaaaaaagttggacaagagtacgaataaaaaactgaaacggagtaaaaacaccggaaagtttttaaatatataaaattaattaactatttaaaataaaaatccattaaatacttcctttttaagtagttaagaaatacagataactccgtttcagttttttattcgtaacaggacgtaatcaatattaattcacgaagcagctcatacatattcagaggtttttggtgctatgaaagctgcaaatatatttgcagtgaataaagattttggaaatattgacaccaagaaaaagcatggtgaagcaatagcaataactgttgaagaaagataccgtcaagaaatgggtttttctaaaagagataaatcaagaggtgaaataggaggagtgaacgattatggggcatggatacaaaatttgccttacacagttttatgggaagttagtgaagatttaactaaaagtatgcctggcgtgacattacttaatacatattttatatggtatgacattatttcaagagcaaaggagataaaataatgaaaaaagtagtatatgtgctaataataatattgttgacaaatacgtttgtttttgcagaaaatatatatgatacagagtataatttagaagaacagtataaacttggtaatgagatagctgcaatcgaaaaccttgaacgattagatattgttcgagatgtacaaacacgttgggatgagacatcattaatcactcgcagagatgctttaaaaatagcatatgtatttaatacatcaagtagagattttataagctgggttaatagttattctagtgaaagattaaaaagtgaactcgaagagatttcttggtcaaatgggatgaatggatattatggaaaattcaggacggcacgaaaatttgaattttgtgatattgaaccattatcatatgactataaattagcggctagtttattttgttataatttattagcaggagaagagcgagatggaaaattatatgcaaattttgatgataacgtgaaatataatgaagcatttataacaatatgtaaaatgctgtcgacttctgggggttctagctttttggcggatttgtacatagaaaaatattattcagaaaattatccgaatgtaactaatccatattatcaattttgtatagataccggaataataaattgtaaaaatgcaataagtgaatatgaaatgaatgtgtatccagagcagttagaagaaaatataacagcatatgaatatttatacttggttaatcaagcattatatatacatacgagacaaataggtgattatgctcaaatgtataattataggcgaataggacgaccaagcgtaacgaaacctgattttgaagagatacatgatataatggattaaaattttaacttttagtgtaatctaaggatatttaaactaattgttatgagttttaataatgcagtatatgctattaaagagtgtgaagatagaaaatgtcaagtatgcaaataaaaattgcaattaaagtgtatatggtaagtgtgacgaaaaatcacaaaaaaacgaatatttatacaaactaaaattgttacggatggcgtaaaaaattacgccatccggtaaccaaaaagctggacaagcgtgcgcataaaaaactgaaacggagtaaaaaacaccggaaagtttttgtatatataaaaataactaactatttaaaataaaatccattaaacaccttaaatttaaatagttaaaaatacacataactccgtttcagttttttatgcgtatgaaactataataataatttacaatattatttattaatgactttttaattaaactaaattacaaatagttttattcagtaatattttttctgattcgctaaatggtttgatatttaatcaaattttatacaaagtataattgcttcaacaatagaattatataacgaaaggagatagaaattttatgaaaaaatttattattgtattgagttttatagtagttatggttataagtatggtgacatttgcgctaactactgaaacaatagaagctaatatagttgattatactatatttggacagattgattcaataaaaggacgtataagcgattatttacaaaatcctataatttcatataatgataatacatatatttcggtaagggatttggcgaaacttatttctaaaaatgtagagtggagtgaggagagtaaggaaataacattaaaacaagcgggaaaagatgaacaattaataaaaagttcagagactgctttagaaattggtaaagccattacagaggaatattattcagattatataaatgaaaattctttttactatgcagcatattcacagccaaccgctgattgggcagattgtgtatatgaggtacatcttttgttcaatgcgagtgaagaagataaaaatgatttaattactatattaaatacatccgatgtagtcataataatagaccctatggatggaagtgtaataatagaagaaagacaagaaaatggggatttaaaaaaattataatatagataaaatatatttggcactgctattattgttctaataaattagaaatgtttcctggggatgcagctataaacatcatcctcaggaaactgaagcgatgtaaatatatacaagcgtgcgcataaaaaattgaaacggagtaaaaatatgggaaagtttttgaatatataaagaattaactatttaaaataaaattcatcaaacacttcaattttaaattgctaaaaatttatatagctctgttttagttttttatgtttatttagtttaaagtactgtatactattgatatccaaatgtattgaatcatgctgaccatatgagaaagacttaaacagggaatattatggaccgggcagagcggtataaataatgctagatgaattgagatagtatagaaaaataaaatatcattttacaggtttagctgatttgtgttgatgttggatatttaatgctggagtttgaaaatgatttaactttttatttattagcagcggcaggaaaatatataaatagatacaaaatattagattcattaaggatatgtttagtttacttaaatatgctgcaagtaagtaatgggataatatatatggaataagtgagaacagaataatagtattctttaagaagtttataatatcgaactatttgctgaaagtatagttaaatcaagcagccgctaagaaaagtgaatattagatacaatttttcagcttaaaataatataatatcactgttgaaaagttatataaaatgtgttattatattctaaagatttgggggtgcccgatatgaacgattctgttaaagagctttgtataggcgaaaacggaaagttaagcgctaaaaatctcagagcatttttagcaaataatttaaaaaacgaaaagttggttttacgtgtaggcgcctttgattcaacatttgaaaacgatattgattatatagtaaaacttattgaagataatacatattatgtaagaaatctgcttaaactcctggtcgagtctgaggatcttaaacctgataatattgatattatatacaaggcaagttcttctatgggaacaacttatttgcgcctaagaaatctatgtgagcttacccaggggaaatatggcataaatttaaaaacaagaaattcggttgaaatcagtgcgtttttaaatgagtttgttaaaactgtgcataactgtctgccggtttcaatgtgcagaaatatttctttgcgtaacaacgtaagaaatgatttatacgccagtattaatcagacagggcttactcatatactggtcaatctgcttgttaacgctttagttcacagtcactctgaaaacagaaaagttgatattatattaaatagttttaaaaaagaaaaattcattgcaatctctgttgtggattatggtataggcgtcgatttgaaaaagattcatgcaattatggaacggaacatcaatgacgtttttgacggcagcaagaccttgcttaggtcatataagggatacggccttttggtttgtcagaaactggccggaaatatggatggaaaaattcttgtctcaaatataaaagaaggcggctcagtatttacagtagtgctgaatttgaccgccaaagaggaaagcggagattttctcaggctgcgtgattcagcggggaataatgataatcttgtggatgttgaactgatagctttggcgctttatcagattataaaaaatgagaagcttgtttaattttagattgaatttgaaaggatgagagaatattgactataacatatgaatatcataattcactttatgtaaacataacaaaccgctgttcgaatgcatgcgttttctgcgtcaggacaaaacatgataatgttaacggaaaggatgacctttggctggatagggagccgagtatcgaggagataaaagctgattttgagaaaagagatttatcaaaatatgatgagatagtattctgcggatatggagaaccaaccgaaaggtttgacgatttaattgagattgcaagatggataaagtcaaaaaaaactgattctgttataagaataaacacaaacggtcaggcaaatcttattaacggcagagatgtcactccggagcttgatggcgctatagatattataggaatcagtttaaatgcttcaaacgctaaagaatatcaggatatatgcaagagcagatatggagaagagtcttttgaggctttgcaggattttgcgaaaagagcaaaagattatgttaaacttgttgtctttagtgtggtagataaaactataccggaaagtgacattgagatatgcagaaagatagctgaagactgcggtgtaaagtttaggcttagagagtatattgaataaaataatatatcccgcatcagagtttatgttttaagctctgatgtgggattttttatgtttaaatttaagataattgtttttttatttgtatattggaattggatattaagcagctaatattaagatgtaaagtttaagacggagagtatagtaaataaaatgtaaaaaggcagtaaaatgtaaaggtgttttttagtgaacaacggcatgtgtgactgtgaccccacctgtatggttgggtcacagaccttggaggttgtaaagaaatgagtatgtatgtataacacacactttttaagaaaagtgtggtcacagccctgtcgaagcttgcgaaaccatgtttttatataatttattatagaataattatatatttattatctaatgcggtgtatatggtgaacttcggtagggcgtgcaatcacgccgcgttaggtgagccatcatctcacgcgaagcgtgaattacttatgacataatcttttccgcgcctagtagccgttaacatttaaatgttacatttaataacagatgtttagatttaaatactgttatatggttcctgctcattttaaattgatttattattctatgttaaacgttaaaatcggattttacaggatttctgctgaatcaaataattttaatccgtatggagccgaattgaattctgatttttaaatttatttagtgatatttttcgtctgtaaattttataaaaaattataatattatagattttgcgggtatattttattcttttttctaatacactatctagttataatagattttaaattatcagtatatattgtagtttttttaacatttggtattctaaagcactttcgctggtatttatagaaatggcaaaaaaataaagaaatgccaaaaaactaaacaactataatggtgaagtgatatgctttgtgcatatttttgtgcttgaatattccgaaaaactgatgtttttaataatatgaatgtgataaaataaaaaaacatcgtcaaattgcacaattgaaataggaggctaaaattcttgttttactttactggttattttgcggtatgttaaaaaacacttgaatttaaaaaaattatgtattagtataaatacaccaaatatatttgaaaagatataaaaatttaaggaggaatttctaatgggtagttttacaagaaaaactattgctatggtattgagtttggcaatgatgataacattgtttgccggacttggtttcatggaagttaacgcggtaggcggcacggtcgttccggttggcactaccgtgtatgattttacaaaattgaccactaagacgcttgcagaaggaacagagggatttgaaggattttctggcacggtgtcagccgcagcctcggacagcaaatcatatgttcagattacaaaaacatcaactgacgctttgacattcgtcgttgacagcgtatggagcgcaacattctcaagtttacacagcaataatgcaaaaggctttatgataacagctccggacggaaagatgtatggaagaaaatctgctgaggacggtttaacattgtctaatatgcctgccggtacatataaaataacggctgtaacagtgcctactaagatggatgatggaacgggtaccatagtggatgtaagcgctaatcatgcttatctttcaacagcggtattcactgttgaatcaaatgaacctcctgctgatgttactaatttaacagcgtcaataggtgatagtcaggttgatttagattgggaagcttcaagtcttgcttcagtatattatatatttgttgatggttcaagtgttcctatagaaacaacatcaactaattatactattggcgaactgacaaacgatgttgaacacacatttgtggttaaagctgtaaactcggcaggttcaagcgccggcgtcacagtgacagccactcctaaagagcctactgaacctccgggaactttcactcttacggcaaccgccggaaatcagagggtaaaccttagctggacagcggctcagtatgcggtttcatatgatgtgtaccgcgacggaacagctatagctacagggcttactgataaaacgtatcaggatacaaggcttacaaacggaacagcatataaatatgttgtgaaagcttcaaataaaaacggttctacagattcgaatgagttacaggtttcacctgttgagccgctgccgtcggatattaaaattattgagcaggcaggatggcttgaatcagctgttgttaaatggacaaatacggcagaagtagacaaatataatgtatataccaaaaaagctggggatacagattatattaaggtagacgacgaattagtccgttactatggttcatattatagagtagacgcagtaggattggaagcaggtcaatataccattaaaatagcgtctgtaatggatggatctgagaccggggctgttgagacagaagtgattaatgttttggctcacaacagagacggttatgctcatgacccggcttcaccgaacaagacagcttcaggcggttataaagataacggaactcccggagatgacgcaataatactttatattgataaggatacaataaacacagttgagttagatgttgttacaaatagcaaaggcggcactactcatgaagtaggattagccaatattatggcaggccgtgaaaaaggttatgataaaacacctcttattatcagatttattggtatgataaactctacagatgtaagcggacttaacggtgatagatatattcaggttaagggatgttataatgtgactgttgaaggtattggagacgatactatgcttaatggctggagtttcctaataaggatggcaaataacattgaggtaagaaattttggagtaaagggattcaatgatgatggtatctcacttgatactgctaatactaatatttgggtacataacaatgatattttctatggacagaacaaaggcggagaccaggaaaagggagatggttctgttgatgttaaaggcaaatcaacatatgtaacagtgtcttataaccatttctttgattcaggaaagtgttcactttgcggtatgcatcaggattcaaacacaggagaattctttgttacttatcatcataactggtttgaccactcggattcacgtcatcccagaataagagttggaacaatacatatatacaataactattttgatggaaacgcaaagtatggagttggtattacaaccggcggttcagcatttgttgaaaataattatttcagaaactgctatcatcctgttctctcttcaagacagggaacagacgctcttggaaaaggaacgttttcaggagaagacggcggtatggtaaaaatgtttaataatactataaccggtgaccgtacagttccggtagttgatgcgagaaccccgattgagacaggttttgacgcatatatagcatatagccgtgatgaaaaggttcctgagcaatatgttacagtagccggcggaacaaagtataacaattttgacactgctgcagcaatgtatacatatacacctgacgaccctgaaaatgttccgggcaatgtaacagcttttgccggcagaacacagggcggagactttatttatactttcgatgattctgtagctgatgaaagctatgcaattgatactgtattggaagcaaaactgaaagaatacacaacatcaatggcttggaactatattgtcagcggaaagacatatccggcaacaactgacggtcctataccgacctcaaaaccaactatcaagcctatagaaacaccgaaaccgacaaacacaccgggaccaactcttgacccgacgcagccaacaccgactgccacagcattgccaacagcgcctccaacagcagcgcctaagacaacatattggaagccggcagcgaatattacagcaggtgagactataggtatacccggattaagcccggtagacaatatgacatatactgagaagaagcagacaatcggcggagtagcatttacaggtaagtgtgttggactgacagcagcttcaccggacggaaagacaggagcttcactgaaattcacaccggagagcgacggaacgtttatagtttattataaggtaaatgcaggaaagactttctatattatggatgaaagcggaaacacggtagcttcttatacaaatgcttcagcgtcgagtgaatataagagcacatcaggagctgttgaagcaggtaaaacatattatggatttgtagacggttcaaaggctgaattctttggagcaggctttgcaaccagtgcaccggcgccgacagacggtccgaatcctacggcaaaaccgacaaacagacctgtgccgacagttgacccggcgtcgtttgactatcagataatttcaactgagtatacaaacgatggtttgagcgttaatgttcagtataacggcagcggtagcggagaggcttctatgatggctgtttcttacagcacagaccgtattatgacaaatgtaaagacaataaacatatcaggaaccggtacgtatactataaacggatttactgagcctgcaaatgaaacggttaaagttttgatatggaataattataattctattgcaccgctcagtgtggcaaagactattgaaaagagttcatcttcaccattgccgtctttggatccaacggataaacctgaccctacaactgaaccgtcggtaaatcctgaccctacagctaaaccaacagtcgaccctgacgctacaagcgctcctaccgcggctccgacttcttcaccttatcctatggagacacaggaaggctcgcatacttggacatttggagttgtaccaatggaagctttaggcgtaaaaggaaatgacggaaagcatgatacattgacaatgtctgaaggtttggttatatatgataatttatatattaatccaagcaaaaaggcaattgtagtagattacagttcaaaaactatcggcactgataagtttactgagagactgaaacttgccggagcgggttctgtcagcgaccagcatttggcgttcacacccggcgcggcaggaaagctttcaatttcttttgctcatgcgtcatctcagggtgagccgagatttatggcggtaaatcaaaacggtacagaaatactgcaggaagctgcggtcggcgcaactcagacaatgacggtggatattgccgcgggtgctcctgtatacatctattccaaagaaagcggattaaatgtgtataaagtagagtatatggcaaacaattaacgcttttatttaataaaaattattagatttcttcccaataatttctaattttattaaaacccataagatattaatcttatgggttttatgatttccaccttaaggtgtggaaataactctacgttttaacggagaaaaaacttcagtaaaagagaaaacgccggaaaaagaagaagctccattgaaagaaaaggctccagcgaaagaggagttccagaaaagaagaggcttcaaaataagaagtctcggcgaaagaaaaaaactcaagtggaataatctttatgtttaaatagaaataaaaggcaggaaaaaagcggatgtacgaaagcggctatctgagatagtaatggtttatatatttcgaccgatttttgatgttaagaatatatttttcctttatgggtgctgagtatgctgccggtttacacgtggtattgatttctatgttgtaaatatgaaattttatatttatatgtttgtctttatatttcacaaattttcaaaaaaatttataagtgttaggttttaaaattactttataatacaaaataagagatatttatactaaaaacaatttatgaaataatgagtgaaaatattttatttattttcatatattttattgtatattcggaggtctaatttcttgacaaaaatgatgctgcgtgatatacttctttaatctaaaaattaaaataagggtatttatacactaaacggaaatacggcagaaatatgtattttatacctgaaactcggtaagctgtttatttatattgaaaaaatgaattgaattttcccgtatgatgcacaattgtgttattttgggcaggttctatggaggaaaaataatgaatcgagatactattttgatagttgatgatatggaaatcaaccgagcaattctccgcaatctttttgagcaggaatataatctgcttgaagccgaaaacggagagcaggctcttatgatgattcgccagtataaggactcgcttgctgctattcttttagatttagtgatgcccgttaaagacggatatcaggtaatgtcagaaatgactcaaaacggattgatgacaaaaattcctgttatagttattacatcggttgactcgatggaaaacgaagtgcgagcttttgaccttggagcggcggatattataatcaaaccgtttgagtctcatgttgtcagacggagggttcagaatgctgtagagcttaaccggcataaaatgcatcttgaggaaatggtagaagaacaggcggcaaagcttagggaatccagggacgtaataatggatactctctcatctatcatagaacaccgcagtgttgagacaggacagcatgttttgcgtatacgtatgtttactaaggtgttgctggaagaggttatgaaatgctgtcctgaatatgagcttaatgagcattccatacgtgttatctctgaggcggcagctcttcatgatataggtaaaatatcaatacctgatactattttaaataagcccggcaggctgacaaaagaagaatttgatataatgaagacccacacagttaaggggtgtgaaatactttcgggtcttgaccgtgtaggtgatgatgaatatttgaggtatgcttataatatatgccgatatcatcatgagcgctgggacggcagaggttatcctgacggcttgaagggagacaatactccgatttgtgctcaggtggtcggcatagcggacgcttttgacgctttgactaccgacagggtgtataagagagctatagaacctgaaaaagcgatgactatgattttaaacggtgagtgcggtgtgttttcaccaaagacgttagagtgcttgaagaatgttaaggcaagtttttttgagcttgcccgggaatatgctgacggtcattcgccgaagcttgattttgccaagtctttgtctgtaccgtctccgctgcattccggcattgataatatgtatgctcaggatcaaataaaatatttcgcaatgcttcgttatgttgattcgacagtttttgaaatagatttagacagcggaatttatcatttggtttatcagcagaacgatgattttcaggcgcttaaaattggaaacagttttgaggaagccgttattaattttgttgagagttcagttcatcccaatgaccgtgagttagttttggatatactaaaaaatcaaattgataattttttcagccatggtttaataaaatcttcaacacgatacagagtgtttcacagagcctcaggaaaatatgtgtggtatgaagctgcagctgtccgcgtgaatatagaaaacccaaaaagtcataaagcgctcatagtttggcgcttgattgatgaaccttctaatattgagaatatgaaacccgagaagtccggcgcttcggtttcaaaaaatttgcctgccggtatacttcagtgtatgaatgaccaatattttactgtgacatatataaatgaaggctttatttctttgtttggttacagtaaagaagaaattaaagagaaatttcagaaccggtatattgatttggttctcccagaagatcatatagcagtaaggcattggtttaacgagcagctttcgttaggaagcacgcaggaactggaatatagggtgaaaactaaagacggcagaacagtttggattttagataaaagcaaaagggtagtgggagaagacggaaacgaatatcttaactgtgttttaacggatataacacaaattaagcaatctcaggaagaactcaggctaaccatggagcgttaccgtataatacaagaccagaccaatgatattatttttgagggtgatatagaaagcggagaagttaagttttcaaataattggaagaacaaatttggctatgaaccaatatcaggaaatattttcactcaaataaaaaagctgtctcatatattcccggatgatattcctgcattgcagaagataatgcaaaaagtgataaaaggcgttccgtatgcagaagcagagctgcgtatagccggagccgagggaaaatatatatggtgccgcatacgtatgacaacccagtttgatgattccggaaaggcagtcaaagcggtgggggttatactggatatagattctgaaaaacgccgtatacaggagctgtcggacagggctcaaaaagacgcgcttactaaactctataataaagagactgcggttcaaataattcagaacagacttgaacgtaataatgagaataaaagttatgctatgcttattattgatattgataactttaagcaaataaacgattattatggacatatgttcggcgacgctattttggccgaaagcgctttcaggcttacggagacgtttaataacggggatatcattgcaagatttgggggcgatgaattcctggtatttattgaatgttccggcggtttggcagtgatagaggaagtagcgcagagagttgttgaaacttttagaaatatatatttaagcgagtttcagaaattcggtttgactaccagtattggaatttctatatatcccaatgatggaacagactttcagggattatttaagcgttgtgatttggctctgtatcatgcgaaaaataacggcaaaaaccagtttgcagtgtatgacgacagttctatgatgaaaagtttcggggtgtaccagaaacaagtttcagcagccgggactcagattgattctgatgattcggataattataatatagacagcattgttcctcttgctttccaaaagctttatgagtctgatgatataaatgaagcggttaattctatactggaattggttggacggcggtataatgtgagccgtgtatatatttttgaggactcggaagacggaaactatgtttcaaatacatttgagtggtgcaacgacggtattgagcctgagattgataatcttcagcatataagctatgagagaatgggtaagaattatcgtgataattttgatgagaacggaatattctattgtcaggatatatcagacctgtcaaaggagctttataatattttgcttccgcagggaataaggtcagtgcttcaatgcgccgtgagagacggtgaaaagtttgttggttttgtcggctttgacgactgtgttatactccgtatgtggaccaaaaatcaaatagacgcattgatatttatctcggaactgttatcaacttttcttctgaaaaaacgtgctcaggaccgagttattagcgcagcccgggatttgagaatgatacttgacagtcaaaactcatggatatatgttcttgacccgcacagctatgaacttaaatatattaatgcaaagatacagcaaatagcgcctgaagcaaaattgggcatgaaatgttacagagcgttttataatagggatattccatgtgagatgtgccctatgaacggaataaaagaggataaaaataaaactattgagatttacaaccctgcgtcaaatatttggtctatggcggacgcctcccgtatacgatggggtaatcgagacgcttgcctaatagcttgtcataatattacggatttaaaaacggataaaaattagatactaatgatgtttcggacgagtgatatgtgtaactaaaggaggcaaagcgtatggaaaaaaacgagttaaacaagaatgatatcttaatgaacggtgcggttgatacggattataatcttcttatgagcgctatgcaggtcagtgttagcaagcatttgcttgatgatgattttactatgatatggggaaatgatttttattatgacctaatagggtatcgcaaagaagaatatgaagcaaagtttcataattgccctaacttatattacaaatatcatcactatgaggatgaacttcaaaagattaaagatttggttgtggagacaattgaaaaaggactatctcagtacagcacaataaccagaatgccggttaagggcggcggacacgtttgggtaaggatgaactggatatatactgatacttatgtaaacggttatcccatatcctatactgttataacaaatgtaaacgaccttgttgaaatgaaaaaagcgcagtctattacatacaataatattcccggttttgtggcaaaatttcttgtgaaagataattttgaactgaagcttctggaggcaaatgaccgtttttatggtttttttggcgaagtcggaaccaatgttgattcagatagattgcttaagatgaatatggataccaataacgatgttatcaattctcagaatgaaaatataaaaaagggaaaacatatacattttctggccaagcttcagagctatgacggtcaaactgcatggatgcagataaacggcgactgtgttgattggatagatggctatcctgtatatcttttgctttatattgacgttaccgatttaacagatttgagagaaatgcagaaaaagctggagattcaggcacagcagcttaaagatgctctgaggacggcggagagcgccaacagcgcaaagtctgattttctttcaagaatgtcgcatgaaatacgtactccgatgaatgcaattattggcatgacaactattgctgcggcaaacattggaaacgatgaccgaatacaggattgcttggcaaaaataagttattcgtctaagcatcttctgtctcttattaatgatattttagatatgtcaaagatagaaggcggaaatcttactgtcagccatgaaaaatttagtctgagacagcttttggagtcggtaactgcgataattcatccgcaggcgtctgacagaggattggaatttacggaatctctcagaggggttttggacgaagagctttttggagactctatgcgtgtgaatcagattttgctgaatttgttgtcaaatgcgctgaagtttactccaagagatgggaaaatccgccttgacgttggtcagctgccttataaaaaggggttaataaagttaagatttactgtcagcgatacgggaagaggaatgagtgaggaatttttaaagaagatatatcttccgtttgagcaggagaacctggatggcgttccgaggttaggaagcacagggcttggaatggctataacaaaaaatcttgttacattactaggaggaacaatctctgtaaaaagccgtttagacgagggctctgtgttcactgttgaacttccttttgaactggcaaataagcatagtgcgtccgttaagtatccgtctatgaacgccatgaaagttcttgtgtgcgacaatgataaagcagcttgcttatacgctttaatgcttttagaaaaattcggtatttctgcaaaatgggttcaaagcggagctgaagcggtaagcgagattaaaaaatcacatgatataaacgaggattataatgtttgcctgattgacttgaaaatgccaggaatggatggggttgaaactgctgaaaaaataaggtctgttgtaggtcatgatactctgataattattattacagcatatgattatgcaggaattgaagccaaagcgcgtgaagcaggcgtcaatagctttttgtcaaagccgttttttgcatcatcattatataatacgttgcttgaggttacgggaagcaaaaatgagattcctaaagtggaagcgaaaacaaatgcctacgatttttcaggacacaggttacttttggctgaggataatcctctgaacttagaaatagcggttgagattttaaagatgactggagctgaggtagaatctgctgttgacggaaatcaaaccttagaatgttttctgaaatccgagaaaggatattatgacgcgattttaatggatattcagatgccaataatggacggatacgaatctgcgagagctatcaggtcaagcagccatccgcaggctgaaactattccgataatagcgatgacggcaaatgcttttgatgaagatgtagcggcggcgctggaatccggcatggacgcccatatagcaaagccggtagacgccgatgtattgtataaaacgttaaaaggatttatacaatagatttatgcaaagtaaattttctattcggaaataacggtaaataaattttctttgactaaataataaaaaagcatactaaataatatttaaaaaatacatgttcacgtactagattattttaatatgatatactaatatcggtggaattttgcgtatttatatcattgcattgaaagaccaatcaaaacaagctaatttgtatcacaccacctaagacgtggtgtcgcagacattgaagaccaacccaaataagccaaacccttgcatacgtggtcaacatcacaactatgtctcattatatgacgactaaataatcattggtatttttagtttatatcatatcatatcatataatttatacaacatacacttaaaagtgtagccacaattaacatttaaggtttaaggttaattggttattattgctcgcacgcaccttacagctgcggtcacagtcacacctaccgatgttcactataaacaccgtattagataataaataattattctataataaattatataaaaatgtggtttcgcaagcttcggcaggtatgactccacctgaaaaggtggatgttatacaaaatcacttgttttgattaacctacaatgtcaataatttgaatactcaatgtaaacgtagtttgcctcgtaaggcgcgcagtcgcgaaaatgttttttataaaaatgattatgacaaactgttctaaacatattcacgcttcgcgtgagactacagctcacctaacgcggcgcataaatgccaataattaacttagtgttatataataaataagacttagttgtgatgtacagatgaaatctgccgcgttaggcgcgcagtcctgggtaaacttttcaatgtagtttgtattataaaaagcggcttctaaacggaagccgcttttttggtttagaattatttgtttaagtcagctgcagctgaaaactgcggttttaatgacttatagatgttttggtagacagggaagtagtttttgtaggtctcaacattttcctgaatcggtttcattgtatctttaacgctgattgcggcttcgcatgcttccggaacgctgctgtaaatcccggctcctactgctgctaaaagagcaactcccaaagccggaccttctgacacatttattgtgttgatatcacagccgaacatgtcagcctgcatttgtctccataatttgctttttccgccgccgcctgaggcacgtacttcagacgcgtctatgcccatttcttttataacagacatgcagtcattcaggctgtacgatacgccttccatgacagctctgagcatatcatattttgtgtgctttgctgataggccaaaaaatacgccttttgcatttgggtcattgtgagggcttctttcacccatcaaatacggaaggtatataagtccttcacagcccggcgcgattttttctgcctgcttatccatcagatagtatgggtcaacccccatgccgtccgctgcgtccatttcagcatggcagaaattatccctgtaccattttagcgataaaccggcgccctgggttactcccataacgtgccactttccgggcactgcatggcatagagtgtgcactctgccttctttatcaatttgaatattgtccatatgcgcaaaaacaactccggatgttcctatagtggaggaaacaatacctgttttaacaattccgtttcctacagctccggcagcctggtctccggcgccgccgacaacgatagttccctcgttaagtccagtgagttttgccgcttcctgatgaactttgcctgttacctcgcatgattcatacatttttccaagcagatttttgtctatattgagtttttccaaaacctcgtcggaccaacagcggtttttgatatccataagctgcataccgctggcgtctgatacttcagtagcgtattcgccggtgagcttataacgtatatagtctttaggaagtaaaatttttgcagttttggcgtagagttcaggctcgtttttctgaacccatagtatcttagcagcagtgaatcctgtcagtgccggattgccggtgatttctacgagacgttcctttccgactttctctgttagctcgtctgcttctgctgtggttctttggtcgcaccaaataattgattttctcagaacgtttccgtctttgtcaagcataacaagtccgtgcatctgtccggaaagacctattccttttatatctgcagggttaacgcccgattgttttataacactgtttatacttgtatatgtagcgttccaccagtcctcggggtcttgttccgcccagccgattttgggttgataaagaggatactccaccaaaaagctggatacagcgtttcctttttcatcaaataaaacggttttagttccgcttgtgccgatgtctacaccgattacatatctcattgataacactccttatataaatttggttatatttcctataaacttctatttaatataacatacggaagacaataaatcaataatgatttaaaattttgctgcaattatttaaattgaaaaagtacaataaatctggggggaatattagtatcaagcaaaataaataaaatttttatataatttatcatagaataattatatatttaatatctaatatacggtgtatatggtgaactgcggcaggtgtgactgtgaccgcacctgaaaggcgcgtgtgcgccacaatatctctttaccattaaacctaaaatgtcaataaatcacttagttgtgatattccccacctaaggggtgggtgtgatacaaagtgacttgttttggttagacgacaatgtcaataaattacttagttgtgatgtattgcgcatttatgcgccgcgttaggtgagctgtcatctcacgcaaagcgtgaatatgtttagaacagtttgtcataatcatttttataaagaacatttccgcgactgcgcgccttacgaggtaaactacgtttgcattgagtattcaaattattctttgagtattaatgttattgacattgtaggctataataaaacaagtcactttgtattatacccacctagaaggtgggggcacagacattgtaggtaaatcaaaacaagtgattttgtataacatccaccttttcaggtggagtcacacctgccgaagcttgcgaaaccacatttttatataaattatcatagaataattatatatttattatctaatacggtgtatatggtgaacatcggtaggtgtgaccccacctttggtgggtgtgatacaaagtgacttcttttattatagccttcaacgtcaataaattacttagttgtgatgtattgcgtgcaagcacgccgcgttaggtgagctgtcatctcacgcgaagcgtgaattaattatggtagattatcataatcctttttattacaaattttcccatgactgcgcaccttacgcggcagataaaatctgccctaccgaagcttgcgaaaccacatttttatataatttattatagaataattaaatacttattatctaatacggtgtttatagtgaatatcgggaggtgtgaccccaccatactggttgggtcacagacattgaaggtaaatcaaaacaagtcactttgtatcacacccaccaaaggtggggtcacagtcacagccctgccgaagcttgcaaaaccatatttatgtaatatatttatagaaatattttctataaatatttttatatacagtttttctgtttgggtttcttttaacttttcaaatgtctaatgaaatacgatagacataagcacataattccaacatatatttaatattgaataaatttaatcagagctggtggggtttaaatgaaatggtttaaagcggttgtcgtcttgattctgtgttatgtgactttttgtttggttgtcttccccgacgcttgtataacagcggtgagcggagcgctgaagttatgcgtcactgctgttatacccacgctgtttccgttctttgtatgcagttcactgcttatagcgtttggattaggcgaatttggaagcaggtttttgagcggagtgatgagaccgctttttaaggtcagcggagcgggagctgtggcggtaattttaggtgtggtgagcggctatcctgtgggtgctagctgtgctgttgaactttataagactggaaagataacaaaacctgaggctgaaaggctgttgagtttctgcaataactccggtcctctttttataataggaacggttgggtttgctatgaattccagcgtcgctttgggcggagtgctttatataatacatatcacggcggcaatatcagccggaattatatatgcgaaaattacatcaaaaaagaatattgaaaataatctgataaatccgctgatagttgatatgtcgccggacaaaaaacctaaaaaactgatagagtttttcggtgatgcagtgtcaaaaagcgttataactattttgaacgtttgcggttttgtggtcttttttgctgtggtggaaaagactattcctgagtttataggcagtccttttatcaattcattgctggagataaccggcggtataaatggcatgtcttatatgggaatagaaccggttttgaagttttcattaatttctatgttcctggctatgtcgggcttatcagtgtttttgcaggtgtcgtctattatatcttctgcggatatatctccaaagtcatatgcggttggcaagctgatacatggcggagtagcgtttattttaacatatgttgtgatgctggtgttaaagctgaccgggtggctccagcagataattggttccggcagtgctgcgtcagcttttgccatgagtgagggctggatagtaccggcggcgtttaacagcacttgtccgcttgactctgttttgcagtatgcttgtcttatggcaggttccgcactctggtgcctactttctatggcggtactggcggtggtttctgcctttttctgcaaggattgacataatattttatatatggtatcatgcttaccaaaagagattattatggaattttgaggtaagctaaatggcggataaaaatgaacgctccgtatatatcggcgctgtcagcggatgtaatgtgatttctgcagaaaaggcggtggttcctgccaactattcagccgtcaactccactactggtcacgggctgatggcggaggaagctttgactgtgatagacaaattcagcggcagaagcgccgaggtggtaggacgtacgaatataaagaacggacctgacagaatggttgacggagctgctctgcaaaccaagttttataattccggcaagggatgcgttcaggcgtgtttcgacaaagaaaacggcggtctgtaccgatatttgaatagtgacggcagtccgatgccggttgaggtgcctaaagatatgtatgacgacgctgtggaggcgtttagagcaaagatttctcagggtaaagttcccggggtgacagatgttaatgaagcagggaattacgtgaggaaaagtgatttgacttatgctgacgctatgaatctgtgcaagccttttactgctcaatctctgctttatgactgcgcaaccgggataatatattgctcgtttgcgtttggaataagcgctttggctgcttttattcttgagtatagcagaaacggcagaaataagaaaaaggctttgttttccgctgttagaacaggagctaaggtctttgggctttcatatgttgctcatattctttgttcgcagtttgctagaactgaactttttaaatctgtttgggatattaccggatacataaacagcgaggactttttcggcggagcggttaagtctgtaaacaatgctgtgcgtttcagcgtaggcgacagcgtttcttctgtaagcgcttcgctgacgcagttttctaaaatgttcagagccgggatttttatgaatctgtttaccatgcttatatttttggttcctgatactgtcagagtatttgtcagggatatttcggggtttgaatatttaaacagggtgtttatgatagttatatcaagaattttttcaacagtgttttatataacagccgctttgatgcttggaagtttcagcagtctgccatatatggtctcaatgactgtgtgcctggcggcttcatgtatcggaggaataaccgggcgggctgttgtttcaagactgacagaaagatttatgatacttcgggcttaaactaaagaaagaggagtgaaatttttatggcttcaaaatgtgatgaatgcgttaactatgagtatgatgaggattatgagtcatatgtttgtttagcaaatttggatgaggacgatatggcgaaatttatcagcggaaattataatgaatgtccgttttatcgtcccggtgacgaatacacaattgtcagaaagcagaattgatttagggattaatatctatgtaagtgaatattctttaagttgaatattttaaaatgggtttattattacttaacagagtttataatattatgcttgaatatgttaggggattatcttagatttgttataatacggaagttatgtagtgtcaaaagaaaactaggcagaaaatataagagagttgtttggtaaacatcggttgggagtgcgtatgaggtatgacacgtgaggtgtgcagtcgctgaaaagtttattatttaataggatcatgacaaattgtttgtatatatgttcacgctccgcgtgagatgaaagttcacctaacgaggcgcataaatgcgccctaccggcgttcactaaaaatactattttttggaatattgattataaaaattttataaataaagtggttttgcaagcttcggagggctgtgactacacttttttaaagtgtatgtgatacaaatccctttgtattgataaaccttcaatgtcaataaatcacttagatgtgatgtgcaaacgttgtttgcctcgtaaggcgcgcagtcatggaaaagtttatataaaaagaattatgttatactgttgaatatatgttcacgctccgcgtgagataacagctcacctaacaaggtgtgcgcaagcacaccctaccgacgttcactaaaaacacggtttttggaatattgattttataatttttataaataaagtggttttgcaagcttcggagggctgtgactacacttttttaaagtgtatgtgatacaaatccctttgtattgataaaccttcaatgtcaattgtggctacacttttgtttaaaagtgtatgttataaaaactatattgtgttatacaaactataaacgccaataattaacttagttgttatataataaatcacttaggtgtgatgtgcaaacgttgtttgcctcgtaaggcgcgcagtcatggaaaagtttatataaaaaggattatgttatactgttgtatatatgttcacgctacgcgtgagatgatagctcacctaacgaggtgtgcttgcgcacaccctaccgacgttcactaaaaacacggtttttggaatattgattttataaattttttaaataaagtggttttgcaagcatcggagggcaaacgttgtttgcctcgtaaggcgcgcagtcatgggaaagtttatataaaaaggattatgttatactgttgcatatatgttcacgctacgcgtgagatgacagctcacctaacgaggcgcataaatgcgccctaccgcagttcactatatacagcgcatgttagattataaatatacaattattctataataaaaatataaaaatgtggttttgcaagcttcggagggctgtgactatactttaaaaaagtgtggtcacatcttgccgatgttcactagaaacacctttattttttgtctggtttgttatatcttattcattgtttttttttggattttattgcggaggtctgtgaggtaaggcaggtatgtgttatttgttttataatattgatgaggtactgagaattaaagtatataggacaaaaacgttctgaactgtttaacactaatttatataaacgaaaaatgtttgcggcggcgtgtaaaactattcacgccgccgcgttttttattttatatttaggcttgtaaattacgtttaaaagaaatataatagaatcatataatttaaggattgattcatggtgatagagtaatagataagacgtcttgttctattgcagtgaaatgttttttttatatgacagcatattgcgtgaaagatatgtgatatattttaattaagattgatgccggtaaagcatcaatgcgtacagtagtctgtgatactattgtgaaaaacgataaaatattttgaaaaacaatagatatataaaacgtcttattttctctgacgtaatattttatttatgtgtgctgtgtgtagaaacgtaaataatattttatatatgctggttttaaaataaagcattacataataggcgccttttattacgaaacaaagctaaaaccggcagatgacggtttggtaaatgaaatccggagaatattccggcagagatcgtatataacagaaagtgcggtaaaggggattttaatatatgaaacggatatttttagttgaggatgataaggctattgctaaaaatcttatgcttctgctccgctcagagggctacacggttactcacgccccaacacaaagcgaggctattgatttggtcagcgtgaataggtttgatttggcgctggtcgatatttcactgcctgacggaaatgggtttacggtttgtacggaaattaaagaaactcaggatattcctgttatctttctgacggcttcgggggatgaggccagcgttgttacagggcttaatatgggagcggacgactatatcaccaaacctttcagaccccgtgagcttatagccagaatcaaaaccgcgctgcgaaaaagcggccgttctgggtctgcgtttgaaatctgcggacttaatgttgatactgcaagcggcgttgttaaaaaagacagcagcgagatttttctctcagctttggaataccgtttgctgctggtgtttataaataatcccaaaagtattatcacaaggggcagactgcttgacgaactttgggacgcggcaggtgagtttgtcaatgacaacacgctgactgtttatattaaacgcctgcgtgagaagatagagaacgaccctgcaaatccgcagattattcttactgtacgcggaaccggctacagattgggggacggatatgtttcgcaatagggagtttaagaggttttcagttctatttctgattatagctgcggtttccgtaacgtttagttttgtattcaatacggcggcaggaattatttctatcatttccgccgccgcttttggcacggcattttttatctttaccaaatcaagatatgagagtattgcgcagatttcagaccaaatcgaccttgtgcttcacaatgccgaccaaatctatatcagcgaatccgaggagggagaactttcaatattgcagagtgagataacaaagatgactatgcgcattcgtgaacagaacagcgctttgagaaaggaaaaggaacatttggcggattcattggcagatatagcccaccagctccgcactcctctcacgtctgctaacttaattttgtcattgctggagaatgctcccgatgaaaatgagcgaaaaaagttgatgagagaaacagaagaattgtttgtgcagatggattggcttttaacaactctgctgaaattatcacggcttgacgccggaattgtggtttttcaaagcatacaggtagacgtgagcagtctgataaaatctgcggtccatccgtttctgatttctatggagcttcataatattgatttaaagtctgacgtaccggacggcataaaatttataggggatttaagctggctttctgaggcggtacaaaatatacttaaaaactgtattgaaagtgtgggcaataatgggaagatagaaattagctgcactgacaatccgttatttactgaaatttccattcatgacagcggagcaggttttaaaaaagaagacttgccgcatttgtttgacaggttttatcggggaaacagtgaaaacgcctccggttatggtataggactggctctgtgcaaaatgattatagtgcggcagggcggaacagtcagtgcaaaaaatcattctcagggcggggcggtgtttactattcgtttcccaaagtgacaaatctctcacctaaaagtcacagagatgtaagctgaaggttctattatatgggtagactaagaaaaaggaggctcacataatggagttcttaagagttgaagatttatgcaaagtttatggcaaaggtgaaaataaggtcaccgctctcgaccatgtttcactcacaatcgaaaagggtgagttcactgcgattattggttcttccggctccggaaagtccaccttgcttcatattatcggcggcgtggacgtgccgaccagcggaaaggtatatctgaacggacaggatgtatatgccggaagcaatgaaaagctcgccattttccgcagacggcaggtagggttgatttatcagtttcataatctgattccaactttgaatgtggttgagaacatcacactgcctatacttatggacaagcggaaggttaacgaggagcgtttgaatgatttgctcggcctgcttggtcttcaggagcgcagaacgcatttgcccaatcagctttcaggcggacagcagcagcgtgtttctatcggcagggctttaatgaacgcgccggcggttatgcttgctgacgagccgacaggcagcttggacagtcataacggtcatgaaattataaaactactgaagctgagtcaaaaaagatacaggcagacccttataatcgtaactcatgatgaaagtattgccctgcaggcggaccgcattatcggcatatcagacggccgggtagtgagagacgagagggtggtgcggtcatgaatattttcaacaaggtcactctgcaaagtatgaagaaaagccgtacccgtaccatagtaacaattatcggtgtcatactgtcagccgcaatgataacggcggttgccacctttgccgtttcactccaaaattatatggtcaacggggcaattcagaaatacggaagctggcatgtcggttttttggacgttccgccttcgttcgctgaggaacggacaattgatgataaggttttaaattctgcatcaattgaaaatataggtttcgccaaactcgacggcggaaaaaatccaaacaagccatacatttttatagcaggatttaatgaaagctcttttgataatttgcctataaaactgctttcaggcagacttcctgaaaacagcggagagattcttattccgcagcatcttgacgaaaacggcggggtgaagttctcggtaggagatactgttacgcttaatatcgggagccgagtgcagaataacggggaacttggtaaaaatgccgaaacagacggcaaagttaagctttcggtcaaggcggagcattcgcttgccgataaaagattcatagaccgggaggagagactcggtcagcacgacccttatattccggaagaagagacgggaaaagcaggggaaacatttgtgccggaaactgagagaagttacactgttgtgggaatctgttcaaggcctgcatttgaggaatattccgcgccgggatacaccttaataacagcgtcggactccgaagcaacggcagacagtctcagtgtgtttgtgactcttaaaaatccgtggcaggttcatagttacgcaagagacacggccgggaatggggcttatatttttaacgatgatgtactgcgttttatgggcctttcggatgataatttgtttaacgcgctcttgtactcaatcggaattattttgataatcctaatcatgctgggctcggtttttctgatttataactcattcacaatttcactgaatgaccgcacacgccagttcggaatacttatgtctgtgggagccacagaaaaacagctgaggaagtcggtgctgtttgaggggctttgcattggagctgtgggaataccgattggtattattatcggaatacccagtataaaactggtgctttctattgcggcaaaatattttggcaatgttttgtacagcaatgtgcctttgaatttgtcaatctcggttccggcgcttatagccgcagctatgataagtttggtcactattctgatttcggcatatattcctgcgcggaaggcggcaggtattcctgttatggagtgtatccgccaaacaaatgatgtcaaggttgaacctaaagctgttaaaacgtcaaaaatctcagagcgtttattcggtttggaaggcattttggcattaaagaattttaagagaaacaagaagcgttataaaagtattgtgttgtcgctcactttgagcgtggtactgtttgtggcggcaagctcttttggaatgtatctgaaaaatgcggcggagagcaccgttgtaggaactgactatgatttatgtttctattcacaggatattgacgaggaagaaatgttcaggctttatgacgaattcaaagctgttcccggagtttatgacagctcatatcaggcaatttcatcatactcatgctcagtaaaaccaagtgatttttcggatgtttatctggaatcaacggattatgaccgagacggagaagctatggatatgcctatggatgttcagtttcttgaagacagcgtatatttgagctttattgaggggttgggcttgccggctgaggaatacacaggtcagaacgcaaaaatgattgctgttgccaaagctaaaagagagagcgccgagcaagaaggcaaaaccgagctgattgatatgtttgaaagccgggatatgaattttcagattattcccgaaaccaataacgcgccgcaggcagagcagggacagaacataaacataacgtttgtagacacaattccgactgacactcttccaaagaagccgtctgaggttaaaccatacgtttttatggcggttgcaccttatcagctgaaagagagatttgttaccaaggacacccatacagaaatgggactgacatttttatcaaacagcccgtctcaatccgctgcagagatggaaaatattataaataattatgggattttatctgattatactctttataacgtgtatgaaatgtttgaacaaaaccgcaatattatctttattgtcaatctgtttacttatgtatttatactgatgatttcactgatagcggtagctaatgtgtttaacacaatttccaccaatatcaggctgcggagaagggagcttgccatgcttcgctctgtgggtatgtcggaccgtgaaatcaataaaatgatgaattttgagtgtatgttttatggaatgagaacgctgatattcggagtgccgacagcggtgcttatctcctggctgatttataaatttttatttgtcggcggagcggaggtgagttttgtattcccgtgggtcagtcttgttatcagcgtgcttggagtgttccttgttatttttattactatgctgtatgcagtcggcaggataaaaaaggaaaatattatagaggccctgcgcgacgatatgacttaatgcggtcaatatttgtttgatttatttgaaaatcttgtcagcatacgtacggctgagattatttaatgaaaacaacagcagagtttaatatttttatcagtttgccccgcctattttggcggggtattttaatttaaatatcattatcacgcaaaatttgcatatgatgtattaaaacaaataaagggctgatagaatgtcaaaaaacaaacctagcaggaaaagagacaatcagaataaccaaccgtcgcttaaagaaaagcttgcagacgcgattgatatttccaaaaacgtcatgctcggcgttcctctcgtgactatggttggagacagagagcttaccattgaaaactatgttggcataatagaatatggagaggatattatcagaataaaatgtaaggcggttaatgtaagcataaccggaaaaaatttagaactaaaaactatgactgatgaatttttatatattaccgggaggttcaaatgcttttcatacgaatactaaattacataaaaggttatcttattattacaattaacggagtttttgccgagagatttataaacatatgcgtccacaggaatattctgatttgggatgtaagccgaaaaaacggcgggtttatggcaaaaatggcaacaaaggatttttataagattcgtgatattgcgcggataacaaactcaaaagttcggattaaaaggagacagggactgccttttttattgattagatacagaaacaggtggcctatcttttttgctgtaatcctctttatagctattgtgcattttacttctacccatataatgagcgttgatgtggagggaaatcagaggataccgacagagcaggttctgagcgagcttagggatgttggggtgagttttggaaaacgcgtaagcggactgaacgctgatactataagaaaccaaatgataattaacaatgacgaaatagcgtggctgggcgtaaatgtccgaggctccagggtgtatgttgagataaccgagaggatagacactgagagcgtgccgcatctgacggaggaaaaatgcaacctggtcgcttcaaaggatggggttatagaaaaacttgaggtaggccagggacagactatggttaaaaagggcgacggagtgcgcgagggcgacgttcttgtcagcggcataatggacagcgcatacggcggcttcaggttggttcattcatacggcgaagtatatgcaagaactgagtatactgccaccaaggaataccagctcaactatattgaaaaggaatacagcggcgaggaaaaggtcagatttggtctgaatctttttggaaataagatagagctgtatccgccgtcgatgagaccggacgataattacgatgaacaggcggaagaatatgtgtatcgcggaagctggctcggtaataatgttgagttcggaggtgttgttgaaaaatttcttgaatataaagaggtagaaaagcaaagaactatacaggaggcggttgagacaggcagaaaggaaatgacagaggaagttgaaaactctgtgcccaaagacgctgagataattgcaagaaaaacagaccataatattatttccggggatgcggtgtctgtgaccgtaacctatgagtgcagggaaaatattgcaaaagagagcgaaattgataaaagtctgattgacaaaaacgacaatttggattatgatataaaagccgaggaagataattccggcggcagataaaatcataggattttgaaatacaaaagaaaaacagaggttttttaatggagagacatatagaagttgaaaaaatggatctcgttataaatctgttcggcagttttgacgagaatgttaagataatagagaaggagcttgacgttgctataatcaaccgtggttctgaaattaaaataggcggagaaccggataaggttgaaaaggcagtggctgctgtaaaccagcttttggccgtggcttcccggggagaaacgataggggagcaggaagtccgttatgtcatgggtcagattgacgacggaaaagaagaggaactggctgatttggggaaagacgtaatttgcatcacctctaacggtacccctttaaaggctaaaactctaggtcagaagcagtatgttgagatgataaagaaaaaccctattgtgtttggaatcgggccggcaggaacgggaaaaacctatttggcggtagcaatggcggtgtcggcttttaaaaataaggaagtcaacagaatagttttaacgagaccggcaattgaagccggggagagcctgggatttttgcccggggatatgcaggaaaaggttgacccttatctgagaccgctgtatgacgctttgggggaaatgttcggctttgaagcgtttcataagatattggagagagggcagatagaggtcgctccgctggcttatatgagaggaagaactcttgacgacgcttttataatcctggacgaggcgcagaataccacccaggagcagatgaagatgtttctgacccgtatgggatttgcttctaaaatagtggttacgggcgacgttactcaggttgacctgccgagggataaaaagtcggggctgagagacgcggaaatagtcctcaaaaatattgagggcatagagtttatgtatttgtctgaaaaggatgtcgttcgtcatccgctggtgcagaagatagttaaggcttatgagaaaaagactatggagcgcgagagggttttaaggcagaaacgtgacagaaacagcagggagagacgcgcgcagaattaatatttgatatacaaaagaggcattgcttatgaaagttgcaattttaaatcaacaggataagataaaggttggaaaaccgctgaaagatttgataaaaaggtcggcggaagcgtcgcttaaattttttgatttgagaaccgatgttgagataagcgttatgctgacagacaacgacggtatacgcgaccttaataaacttcacaggaatattgacagggcgaccgacgtcctgtctttcccaatgtttgagtataatgaagccggggagataaacgaggattatgctgagctgaatgaaatgggagaaatatgtttgggcgatattgttatttctctggagcgcgcagaagaacaggctgaggagtatggtcactcgtttgagagagaggtcgggttcctgactgttcactctatgcttcatttgctggggtttgaccatatgacagaggaagaagagaaagaaatgtttgactatcagagagagatacttgagcagatggagctgacgagatgaaaaaactgataaagagtttcggttacgctttttcgggactgtgggcgtgtataatatacgagaggaatttccgtatacatatcactgccgctttggcggtatttgtttttgcgtggctgtatggcgttgacaatgttcatctggcggttttggtgctgacggttgcgctcgtgtttataaccgaggcggtcaacacctcgattgagaaggcggtggattttttgtcgcctgaaagatcggaaactgccaaaatcgccaaagatgcggcggctggagctgttctgctttcggcaatagcggcagtggctgttgcggtgatgtcatttaacgatcttgacaggctgagctggacttttctgcagctgtttactatgcctaatttaatttttactgtggcttatataattttgagtatcgtatttatattttgtatagtacctaagactaatattgaaaggaaataattatgaaatcaggatttgtcgctataaccggaaggccgaacgcagggaagtctactctgcttaatcggataataggagaaaaggtggctatagtttctaaaaagccgcagacaacgagaacaaaaattttaggggtgcacactgaggaggactgtcagattgtcctgattgatacccctggtatacacaaaccccacaacaagctgggtcagcgcatggagaagtatatatactcagcgacccaggatattgacgtgctggtctatgttgtggactgcaacatttccgacagggaacttgagcttgaaaaggagtcgcttgacgggctgaaaaaatcaaatgtacctgttgttttggctgtcaacaagattgactctgttcaaaagctgagtttgctgccgctgatggacaagctgaagtcaatatacaattttgatgagattattcccatatcagcgcaaaagggtgaaaatgtggacaggctgttaaaaatccttgagggatatttgagcgagggtcccaaattttttccggatgatattataactgatcagccggagcggcagatagttgctgagtttatccgtgaaaaggctttaaggctgcttaataaagaggtgccgcacggtattgctgttgaaatagaaaaaatgagccaaagagagaacgggacttatgatattatggcggcaatatattgtgaaaagcagagccataaggggataataatcggaaaaggcggagagaagctgaaagatataggcaggcagtcgcgccaggatattgagagatttttaggtgaaaaggtttatcttgagctttgggtaaaggtgaaagagaactggagaaatcttgataatttcatcaccgaaatgggattcgataaaaaataacagtaaagacttttatgtgatttgtgaggatataaatatgtcgttatttaaagttgcgcttctgcagatgacgtctgcagggacaaaggaagaaaatctgcgcaagggcgtggagttttgcagcaatgcgaaggctatgggggcggatttggctttgtttcctgagatgtggaacaacggctacagtctttcctatgacatggaggttatggaaagaaattcagaggaccaggacggcttgtttgtcaatacttttaaagagctggctgccgagctggaaatggcaatagctgtgacatatttggaaaaatacaagcctctgccaagaaataccgtgacggtttttgacaggcacggcagaaacgtgcttacatatgcgaaagtgcatacctgcgattttgatatagagaaaaatttaactcccggcgatgagttttatgtgacagaactagatactgaaaacgggaaagtaaatattggggctatgatttgctacgacagagagttcccggaaagcgccaggattctgatgctgaaaggtgcggaaatcattcttgttcccaacgcctgcccgatggagataaaccgtttgtcacagctcagggcaagggcgtttgaaaatatggtgggaatcgccacagcaaattatgcttatggccagcccgactgcaacggtcattcttcagctttcgacggcatggcttacggagagatacgccccggcacagttgaggccagagacacgcttatagttgaggccggagaggctgaggggatatatttggcgcagtttcctatggataagatacgtgaatacagaaagaatgaagttcatggaaacgcctacagacgtccgcttaaatataaagaactgatttctgagaagatagacgagccgtttataagagatgattacagaaagtgaaaacagaactctgatttatagctatgaaatacgagcgttatgattacagcgaatgaataaggagggctttgatgcctaatattgatgtttgcggtttggtaaccagggaggtcaaatatggtgaaaacagcaggatactgactgttttggctaaggatataggcaaggtttcggttcttgccagccgtgcgagaaccaaccgttcaggtttgctgactgcaacacagctttttgcttattctaatttcacactgtttaaagggcgtgagaacagccttatgaagatgaatgagggagaagttatagagtcattttctgagataagaaattctctagacaatatggcatacgcctcatacttttgcgacatagccaatcatatatgcaccgacggcacagaggagaacgaactgttgggcctattgctcagagtattaaagagactgtctgtaaaggaagaaaatacggcggagtcgctcaaagccgagtgcgtttttctgttccgtgcgctttcaatagcggggtttgcgccaaactgcgacggctgcgcttcctgcggcaaaaatgaaaatataaaattttttgatattcagaacggtatttttttatgcggaaactgttccgcaaaacccaggcagaacactgtcgagattaccagcgcgatgtataacacgatagattatatagtaagctctgagattaaaagggtgttttcgtttagtttgggggagaagagtttgagatatttggcaggtgtcggagaggcctgtgtaaggaatcagctggaatacgattttaaaactttgaaatatttaaataatgtgagagatctataggaatttaaaacaatattattttatataattattgctgtgtatgcagcaaggaattttatatttaagtgaatatacatattattaatttgtatatagtgatatgtctatgagccggattttcaagcacggctcattttttaattatttgttacatatacccgagcctgcgcgcctaacgcggcgtctatcagcttcattgagtattcataatattctttgaatattcatgttattatttgcgtattcatgttattgacattgaaggttaatcaaaacaagtcattttgtatcacacccaccaaaggtggggtcacagaccttgtaggttatgacaaaataaaatcatatgtattacacacactttaaaaaagtgtggtcacagccctgccgaggcttgcctgaaaatgtgatttatataattaaatataaatataaatgtaaatgtaaataagctggtgttttggcgaacatcggtagggcagacgtcgtctgccgcgttaggtaagcaaccatctcacgcgaagcgtgaacatacgtataacatttgttataatcctttttataaaatttattccgcggctgcgcgccttacgcggcgcttatcagcgccctgccgaggcttgcccgaaattgtgatttatataataaaataaaaatataaataaaaataagctggtgttttggtgaacataggtagggcagacggcgtctgccgcgttaggtgagcaaccatatcacgcgaagcgtgaacatatatataacatttgttataatcctttttataaaatctattccgcggctgcgcgccttacgcggcgctgataagcgcccttccgatgcttgctgaaacataattttaatttatgcaaagctatttataaaatacaaaactcatatttataaagaaatttattctttatttatatgagttttatgttttattttgttttaataatatgattaaattatatattgttttttagcttttgactggaagctctatttttttgttttcttcagattctttatagagtacaaatttgtttcctataacttgaaccacgtccgcagaggcggcttctgccagctctcctgccgcttcccgggcggttagcattgagttttcaagcacgtgaacttttattagctctctggcttccaatgcgtccagaataagggcgaccatgttatcgtttataccgtcttttccaacttggtatagcgccggttctctgttggcaaggcctctgagataagcgcgctgtttactgtttatcatattgctctccttttgtttagttagttttcagcagttcggcagtcttgctgtcaggctgtctgccggtctgacgtatcagtgcttccgaaactgcggcgtatacttttttggctgtgatgtccggttcggagtttttgaagcattcaatgtgtctctttactgtctcaaaatcgccccgctctataggacctgtcaaagcgtttataggtccgttttttagaatattgttcatattatttttcagcagaggtcttatggcggcgaaggcgtcgtcatatgaaaaaccgcattcctctaaaagttcgcaggaaagttcagcgagagccacaacaaagttgcttgcaaaaacagcggcggcatggtatttgcttttgttttcggcgctgagaatttgaaagcggctgccgcacttttttaaaacttccgccggaacgccgcttccctcaacggtgaaaaatgcttctctaaaatctttatagcttgtaaatttatcattcaccgcaagcagcatatgtatacttgcggtttcagcttttaatattttgagttcggacaaaactgtactggaaagcgcgccggaggtgtgacagaaaattttattgcttatatcaatatcatattttctgcattcactggctatattatggcttacatcagcaatagcgccgtcgttcaccgttataaatattaaatctgaatctgtgattatctctttcagtccggtataagcagaggcagagccgccgataaattctgcggattcctcagccgagctttgtgttcttgaataaaagccggagacggaaagcccgttttcggacagatatttgccgagtgaagagccgacccgtcctgctcctataaatcctattctcatatttttctccattttatttagctgaatattcgaaactgtcaaacgagggataaatagtgctttcagttccgctgtaggcatatagaccaatcatagcgccagtaaagcgtttgcccttgctgattgcctgactgcaaaggtaatacaggttctcggcagcatagacctctgtaaaagttttgccgtcatggctgtagctgaatgtgcgttttaatccttcggttgaaattttcaggtacaggctgtcggttacctctgttatatcaacggtgcaggtatatttctcgtcctcgtctattttttcaaacagttttaacgcgtatccgtcaccgttcttatatattccatatgtgaagtatgtattctcatcataatatccggtcattccataattttgttcgctgtccagcttgattcccaaatccagcttgcatacagcgtcaaaattaaagtccggctgtcttctgaccgtaatgtttttggcagacgttgaactgagcggacagcgtgagccttttattatcagcttactgtccttaacagtgattccgtctgcttccggcgttcttgggaatatccagtcaggttttaatttgtctccgtcaaaatcgtcaaatcctgatttttcttctgtatccatagccgggagatttggttttttctgcagatagctggggccgttcaagctgttaacgataggccagccgtcggcggtccatgtcaccgggtcgagacatgtctctctgcccaaaattccatactcgccgtcgagcagtctgttgcacagatataccatataccattcgccgttttgagtctcaacaggcttgccgtgtccgcagcatgtgattggagcgtcataatccctctgggtcataatcggattgtatgggcagggttcataaacgccttttaaggttttgctccttgaaactgtcacctggtgcataagcccggtgccgccctccgcttcaaagagatagtaatatccgtctttatataatagatgcggtccttcgggagcgcgtttattggttccgtagtataagagctccgcgtctgaaatcttttttgtgcagtcgtctcccagttccagtattctggcacccctgttcaggagcatataccgtctgttgtccttgtcggtaaatatagacgggtcgattccgtcctcttcaataaatgccggttcggagtacggtccctcaggtttttcggatgaaaccacgatttggcggcgctttacatctacgtcatcattatatctgagggtggctgtgatataaaactttccgttaaagtacgaaatatccggcgcccagtagcctctgccgccttccaaatcatctatgtgcgcccagtcgggatttgtgattgcatggcctataacttcccagtgcacaaggtctgtggaatgagagataggtatgcaggggaagaagataaaggatgagttaaccatataataatcacttcccacacgaacgatagacgggtcagcgaaaaatccgcgtcttatcggattgtgatacatatcctcatatttggctccgatgacctcttcaaaataggcctctatctcagcaagaccgttttcgtgagcaagctgatacggggtcacaaggtttttgtcagcgtcgcagggagacattccaacacgctcaaccaaatacttcacacattcaagactgcctgacataaccgcttcgtgcagacaggttctatggttcttgtctccgatattaaagctggcgaaagagtattcaataagaaaacgcagcatttcaaaatctccggttcgggctatataaaaagacataggaacgccgttttcgtcctcttcatttattctctttggattttcgtttaataattctttgattttattcaggtcacggttttttataagttctatcatttcactcataacttttactgcccctttcaatatacagatatttcataaatacatatattctaacagtgtttaagaataaatgcaacatttattttaagtatataaattgctatatatatatccaaaaattaaaatgacaaattgagtgcatttaacacatcgcttgatgaatatccgccaaacatacgacgtggataattgtgaatgtattttattgtttttatattttgattatattaagtataaatcaacctatcagcctgtttaaacacttatctgtcgctctttcatatatactgtacggaagcgcataatataagcttgtgcgtttccaatttatttttaaacttaccgtatatgtattcaaatcgaaactgatttttacttaatagaaaaacagacatgggataaattatcagcttaagaatcgtttctgcggatagtgaaaaatagcgtttattcagtatttttcaggtctgcttgttgacaaattttatcgtttatgatagtattacaaaataattgattagaatttttgtccgtattaaagcgggcttgtactttaggataaaaccagcagaattaggaggaaaaaccatggattttgtaatgagttgtttgagcgtcggcgaaaatggcaatctttctattggaggatgcgacgttgccgcactagctgaggaatatggaaccccggcgtatataatggatgaggaccagattcgtgaaaactgccgtgtttacaacagggcgatgcaggagtattacggcggtaacggtatcgttctttatgccagcaaggctctttcatgcaagtatatatacaggatgatgaaagaggagaacatgggtatagacgttgtttccggcggtgagatgtacactgctttaaaagccggattcccggctgaaaggatatactttcacggcaacaacaagactgacgacgagcttaaaatggcgcttgagaacggcgttggcagaatagttgttgacaatgtttttgagcttgaaagccttaacagactgtcaggggaaatgggaaagactgcggatatattgtttagaataaaacccggtatagacgcgcatacccacagctttatcaggacagggcagatagattcaaagtttggggtctcgcttgaaaacggcgagactgaaaatataataaagatggctgacgatatggaaaacttgaatgttgtcggcgttcactgccatataggctctcagatttttgagcttgagccgtttgaactggcggctgaaaagatgatgacgtttatagccgaccttaaagacaaatatgatatatctataaaagagctgaatttgggcggcggttacggcataaagtatactgagggcgacactcctattgattatgacaagtatatacaggcggtgtctaaggttgtccgccgtatctctgaggagagaggaatcccactgccttatatagttatggaacccggacgttctataaccgctgagacaggtctcactgtttacagggtaggcgctgtaaaagagataccgggggtcagaacatacatttcggttgacggaggtatgggagacaatccgagatatatactttatcagagcgagtatgaagctgtcagagtaaataatcctttagctgaaaaaacagttacggcaacattggccggaaagtgctgtgaatccggagacattttgattaaggacgctaagctgcctgaaatcaaagttggtgatttggtagcggttttggctactggcgcatataattattcaatggccagcaattataatagaataccgcgtctgcctatagtaatggtgagcggcggaaaatcaagattagccgtaaagcgcgaatcatatgacgatttgattgctaacgacctgtaaaccggaggaatttttatgttatttagtgttttgggtgacgcttcgatgaactttggacagaagctgctcaccatattagttttggtgttttgtgtgcttctgtcgctgtctgttcatgagcttggacatggtctggcggcttacgctatgggtgactatactgcgaaaagcagcggcaggctcagtcttaaccctttgcatcatcttgaccctatcggcgctatctgtctttttctgtttggattcggctgggcaaaacctgtgccggttaatccatataactttaaaaatcaaaagggcggtatggtgctgacgtcgctggctggtccgtttaccaattttattttggcgtttatcgctcaaatcggcgttgctgcgcttgggagcataacattcaggtctgcgaatattggttatgatatagcttcggttttctatatgatttgcagctatatggttattatgaaccttggtctcgcaatttttaacctgataccggtgcctccgcttgacggctcaaaggtgcttagctctgtgctgcctactgatttgtattttaaatatatgcagtacgaacagtttggttttatactgcttatcttgctgataaacctgccgtttttcagcagattgctgaatatgtgcgtgtatgggataatgggattttattctcagattatctcactgttcattcattagggataaattttagcggggattagtgattttgataaatggaacaattaaactttaaggttttggactttgagggccctctggatttgctgctggcccttataaaaaagaataaggtcagcatttatgatatacctatctccacaatagtggagcagtattttggcgttatgcgtcaaatgaaggaatataacctggatatttccagtgagtttttggtgcttgcggctactctgctgcaaataaagtcaagaatgctgctgccgaaacctgttgaggaagacgagactgacccgagagaagagcttgtgaaaaggctggaagaataccggcgcgttaaagcagccgcggagtatcttgaagccagaaagcatattggggagtcgatgtttttcaaagaacctgacaaaatcgagaagcctccggctgagtggaattattccaagctgacccctgaaaacctgcttttagcttataaacaggcatatcagaagatggagcggaaactgccgccgccgaaatattcgtttgacgggatagtggggcgtgaaaaagtttctgtgcgctccaaggttaagcaaatttggggcaggctgttcggaaagacaaaggtctttttcaaagaactttttaaaggaacaaaatccaggcctgaggccgttgcttcctttttggcggttcttgaaatgataaagctaaatcaagttaaagtcgagtatgatgagagcggggacatatcaaatcctatcgtaaccaaaagcggagacgcggaacttgatttaagcgcgattgaggactaggagaagataaagatggaaatcagggaaattcaggccattgtggaaagcctgctgtttgcggcaggggaagcggtggagctggaaaagattgccgatatagttgatgttgataaaaaatctttgagagaaataataaaaaaaatgatggatacctataattatgaaaagcgcggtatccatataataaagcttgaggattcatacaggatgtgcactagaggcgaatataaggattatgtttcaatgctgatgaagccgggcagaaagctgcagctttctaatgccgctatagaggttttggcgattgtcgcgtataaacagcctgttacaagggctacaatagagcatataagaggcgtaaactgtgactatatagtgaaccggcttatagagagaagatttatagccgagatgggacggctgaaagacgctccgggcagaccgatactgttcggcaccactaaggagtttttgcagacatttggtatagagagtataagcgaccttcccgaatttgagtctttggccgtgcctgaggatactgacatggagcagatgacgattgatgagaagcaggaacagctggagtttaacagcgccgtttctgaggaagccgcggtagaggaagccgcggtaactgaaacatccgataaaaatattgaaaatgcaggggagtaatttttattcggcaagggatataagtctttttgtttgaaacgcatgagttttattagaaaactgtttagacgtgagacgatgtataatactgagaggtggtataatgcacgtagtttggataatacttggtataatagtatttatcatttgttttgtgctatggtcaaccgttacgctggatatagcctctaacggtaaaaaaactattattaccgccagtatgtacaaatttcttaaatatgaaatagttttgccgagaccaaccgaattcggcgaggacaagcatacgcctgaagcggagcagaaagctgataccacagaaaatgaaactatggaaaatgaattctctgaaaaagaatttcacggtaatagaagaaatattgcggagcagaaagccgggacggctgatagtgcagacaatgattcaataggaaaagaatttgatgaaaaagaatttcatagtaacagagcagattttaaagagcagaaagctgataaggccggcggctcagaaaataatgagtcagataataattcctctgaaacagataaaggattttatgaaaataaaaaaagttttatgggaacctttaaagaggatttaaaaagtatttgggacagtgaaaaccacaatcttgatattccgcggatatatgaggtgattttaaaatatactaatataataaaaagcggcaaatacgggcttaataagttttttggatatatgaagcataagattaggattaacagactggatttgtatattcgttttgggacaggcgagcctgataaaaccggtatgacatacggtgcgctgtatggtttggcaggaagcataagtcctctgctgaaaaagtttttcaagatgaaagacagcccgagactgtttcttgacccaaactatgtgacccggtgctttgaatttgaagtgggaagtataattaaaacaagggcggctcatattatcaatgccgcatttatagctcttgtggcttatttaataaaaaagagaaaaggaagtgttgagaatgtcagaactatcggacaagcatccaattgaggggttgatgtcttctgcaatgcagggactcaaagaaatgattgacgttaacacaatcgtgggcagccctattacgacttcggacggaactgttataatgcctatttcaaaggtggctttgggttttggagttggaggctctgagtttcctaaaaacaaaaaactgctcagcggtgaacaggaagaggtcaataacctgttcggcggcggaacaggcggcggactgtctttgacccctgtgggatttttggttgttggcaacggcactataagaatggttccggtcagcgaggagaacagtatctatgacaggattatagacgcggttccgacggctatagataaggtcagcgagataatttcctcagctaaaggaaagagcaatgtggtggttgaccatgaaccagcggcgcctgacagttatgttccggatgatgaaagcgatgattatgttgcaggttcgtttgaaggctaggcggtctgcgttttagacttaatgattaggagtaatgttatttaatgctgattagagagaaagttctgccgtttatgctgagtatctttatttttgcggcttgtttcgtgggtacagagcctgcatatgcggcggataatcaagttataaatattgtgctggacccgggtcacggcggcactgattatggtgcgacttcggtcggaggcctggagtttcaggaaaagaatatcacgtttaagcttgcccagtatatacagctggaattgagaaaatacagcggcgtatctgtgaatatgaccagatatgccgactaccatatgaccaacgctgaaagagcggattatgctcagagagttggggctgatgtggtagtaagcctgcactttaactcgtcttcggacaggtctgttcatggcgccgctgtctgtgcgtcagggctttgggaatatactaagcccgatttgggatataatatattatcggagctggcggggcttggtatagacacgtccgccggagtttatactcaggcgtcagccacgggaaacatgtggtgggacggtgagagattggcggactattcaggcgttatgcgtgagtgcgcctatcgtgatataccggcgatttctgtagagcactgttacttaagctgttatgacgagcttatttattataataacgacattgcgctgagaaagctggcggccgccgatgtgaggggaattgctgaggaatatggtctgcagcttcaaaaatccgagggcaatgttgacagaacgtacgataacgcatatatcaacggatatgaggacggcacattcagaccgtcgggaacaataacccgtgcggaagccgctacaatgctggcaaaactcagcgacagttttgaccctgagcagcagtacagcactacgctcagcgacgtgccggcgtgggcgtggtattataagtatattgcgtttttgaattcagttgggttcataaccggagacgtgtatggaacatacaggcctgacgacaatatgtcaagggccgagttcgctattcttgcctgcaggtatttggggcttcagccgggcggagagagcggattcagcgattgcaaaggacatatggcggacggttacattgccgccctcagaaacaatggttatgtcggcggtgatgaaaacggcgagttccatccaaatgacgacatgatacgttcttcggtcgttatgatgatgaataggatactcggaagattcccggtatgcagcactcagaaagaaaatccgtttacggatatagctcccggattctgggcttatgacaacattttggaagcggcagtatcacacgaggttcgttaattaaacataataatatgataaatgcggacaatatgtttgtccgtgtttatttttggtgtaaggctcgtattttgtcaaagtttttgggtcaatagttgaggaaactttgaatatattgatttatatggataatcaattcttatttttataggtaatgtttgtatgattgattgtttttacgtcatttgaaaacggagatgataaattgggtattaaaaaacataatgcggcaattaaatatataggggtctttttgttaacggccgttgttttgcttacgaatttttatgccgtcaacgctgaggatacggggacggtggggacatcagctcaggccgccgccgttatagaacagaactcagggagagtgctgtataacaaaaatgccgaccaggaactgccgatggcgagcactactaagataatgaccgccgcagtggcgctgaaatacggcaatctttcggatgttatagaggttagcgcgactgcagcaggagttgaggggtcaagcatgtatctggagtgcggtgagaagataactttagaaaatttgctgtatggactgatgcttctctcgggcaacgatgcggccgtggcaatagcggaacatattggaggcggagtggacggatttgtcgagctgatgaacaaaactgcctcagagcttggtttatcacatacccattttgacaaccctaacggtctgccgtcagatactcattacaccacggctttagagctggcgaaaataaccaggtatgctatgagtatgccggagtttgtccagatagtatcgacaaagagcaagacgataccctgggagggtaagggttatgacaggagcatgacaaatcataataagcttttgggaagtttagagggctgtataggcgttaagaccggatttacaaaggcggcaggcaggtgtttggtttctgccgtaaaccgaaacgatatgacattgatatgcgtgactttaaatgacccgaatgactgggctgaccacgcgtcgcttcagaacagcatgtttcagaaatatagccaaaatgttttgacctcaactgaaatgataatagataagatttctgtagccggcggaatgctgggatatgctggggtcagcccgaataagacatatacatttccggtttgtgaaaacgacagcgtaagcgttgacacaaatgttgacagcgagaatatgaagttcccaataaaaagcggcgacgtggtcggtacgggcacggtgacggtaaacggcgaaaactatggaaattttgaactgctggcaaacagcgatatagatttggctcggccgtctaaaggaagtttttggaatgatatgaaaaatgatattgtatatgtttttcagtattggctgagcatgttccggtgagatatgaaaagttagataatatatataagatgagaaatataaaatcatataacttatataaaatcatatgagatatataaagggaagccggcagaaaattaagggtgttgttttgtgaacatcggtagggtgtgcgtaagcacaccgcgttaggtgagccatcatctcacgcggagcgtgaacctatatgaaacgatttgagattattctttttatacaaatttggccgtgactgcgcgcctaacgaggcaaactatgtttgccctaccgaagcttgcaaaaccacatttttatatttatatttagaataattatatatttataatctaatatgcggagttcttagtgaacatcggcaggacgcgcttgcgcgtctcgttaggtgagctgtcatctcacgcgaagcgtgaacctatatgaaacgatttgaaagtattatttttatataaatttttccatgactgcgcgcctaacgcggcagatttcatctgcattgagtattcataataatatttgcgtattcatattattgacattgaaggtaaatcaaaacaagtcactttatatcacacccaccatactggtggggtcacagacattgaaggtttatcaatacaaagagatttgtatcacatacactttaaaaaagtgtagtcacagccctaccgaagcttgcaaaaccacatttttatatttatattatagaataattatatatttataatctaatatgcggagttcttagtgaacatcggcaggacgcgcttgcgcgtctcgttaggtgagctgtcatctcacgcgaagcgtgaacctatatgaaacgatttgaaagtatcctttttatataaacttggccgtgactgcgcgcctaacgcggcaaacgttgtttgcattgcatattcatattattgtttgcgtattcatattattgacattgaaggtaaatcaaaacaagtcactttatataacacccaccatactggtggggtcacagacattgaaggtttatcaatacaaaggaatttgtattacatacactttaaaaaagtatagtcacagccctaccgaagcttgcaaaaccacattttatatattttttatttttaatatataacctttcttttatgtttagctttattgaagactttctacagaattatacgagacatataaaattatatgatgtatataaatcacatgagacttacaaatcatataatatatacaagctatataatttataaaaaattagacgagtaatataagatatataaagtcaaataagacataaaataagcagaaaattttgaagcacaaatacttcaaaattttctgccctttgtttttatttgcttattattgcggatttgcctgaggctttcgcttggtaaagcctgttatcggcaagattaaataaatcataaaactcatcggattctatttcgtcggaaccggcgcatccaacactgacagtcagttttatattattgccgttttcgtcggttgaatagctgcatgccggtgtaaaaatatcaaaaatcattttttggaattcgtcataattttcactttcgtatactataatgaactcgtctccgccatatcttgcgataaacgtgtttttataatctttaagtgaattattccaggattcagctaaataatttaaaatctgatccccggttctgtgaccataattgtcattgacttctttaaagttatcaatatctaaaatagccaaacagactgaacggtttaactttttcattctgctgtagctgtttataaaatgctcttcaacatatctgcggttgtagacatttgtcagcggatcggtgataagctgtttgtttttatgttttaggtcgagtatggtgttaaacatttcgtcttcgctgaatataaagttccggctgatatccttaaccatttcaagtgcaaaactgcggccgtctacattgatatatttggatattatataatataaattcttatttatattctcaaatttaacataaaaatccttgtctatcaaggttcttgcagaaatacagttggagcaccggctttcatttgaccaaacgttaaaacaaaatccgtcttttccggtcaggctggccgatgataattcaggcatcagtttatccacagtatccgattctttcagtatttcctcagagataactttgcagataatagggtcgacaactctgactatgtcgaaggtatttcggaggatttttatttcacttattaattcgttataggtgtaatcgtgtttcattataattctcctgctgttccggacaatatttgggattatccgcccaatctattatccaatttgttttatattataacatgttgtattttgtttgtaaataacagtcggttaaaatcatatatacaaacaagtcagacatatttattgattttctatcattatttaatattttaattttgagcttaaaaaatttcagtcattaaattttgtttgatactatgcgtgtagttttgcagtctgaattgaaccaaaaagcaacaaagccggctaaatatatgaactattttattctctgaattaaacgttgttttcatatgggaaaatctgccgaactgttttatatttttattacagccatttatttatgaaattaaataattcagtatttttcgctgaatgcagccgtatcagctttagatgaaactttctgtttgcttgagcattctttcgtgcacggctgcatttctttgcgtatcaaatgtggttaagcaacaataaattttgtttagtacctatttttatccatatacgtgtggaaatttttagtatgttttaaattatccacatattcgcagtatatcaagattaagattctcattgaatgtttctttttgtaaatttagccgccaatcagacgtacagattagcggctattagtaatttaacaatcttgtgatgaaaacagtccgaacttatttaactattttatatgttccgtatataacttttgaagcttccgctctcgtggcagaaccgcgtggtttgaaacttccgtcctcatatccgttcataacaccgagacctacaagttctgcaaccgcgtctttagcatatgcggcaatatctgaattgtcagtgaattccagtatcacgccgtcgccgctcttgtttattgctctgtataaaatagtagccatgtcttgtctcatgataacttctccgataccgaagtattcatctgactgaccctgtacatatccggcgttgactgctgctgtaacatatggagcataccatttagtttcgtccacatcattaaaatgtgaggttgtgtctgtggcgtcaaggccaaacatctgaactaccattttacagaactgctctcttgtgacgtttccgcttgggtcaaacttattgtcgcccataccgtttactataccggcatttgtaagaccgatgatagattctaaagcccagtcatatccgtccaaatcagtatatggattttcgtctgcaaagttaggagctttggtgggatccggttcagtcggtgcggatgatggataaacggttccggaaccgttagtatctccgcctgtattgccaccggtacttccgctctgatttttgttcgggttaacagttttataagctgttactgtatcttcacctaaataatatgagatgtcattatatttgtaatagcatttaacgtgaacaacgtctccggttttatacatttttgtggtagacggcaaacttacggaaactgactcgtctccggctttaaaagccttttcactactgttttggataacttcgccttttgagttgtatgcgtaaacctgaacagttgcgtcctggtctattatagcctttcttcttttgacggaaacagaccagctgtatcctatgtttataccgttagtgattgagaatatgggcagattgtcgcttacaacgtttccgtcctcaattttattgataattttttctattgaagacagcatatattctttatatgtgccgctgtaattcttattcacatcatcatataaactttgcgctatagtcttcagcgatgacagatatgttttatatagagtatgcaggctgaaactgttggcttttgagtattgaacttcaagagaagctatttttgtgttataattctcagccgttttgtcctcaagagttttcagcgctgtttcaatatatttattataatctgttagctttgataccacttcattgtattcttcagttgcttttgcggctcttttaagtgcgcttggaacagaggttgaaagattgtcaaatgtggtctttaagtattcatagtttaaagccgagctgtcgtcagttattccggcataacattccggcatctgcataatccctgaaacttcctgcatagctttagcggctttttgcagggtataaaagtcagtaattgatttattgctgattgagagagcggtatcgattctttttgtgcttgtttccatcatagaatcatagagatcaacagcggcgtctatttgtgcgacatagtagcttgagatatcatataaatcgtccttttcttcatccttataaaatgtcagtgctgatatttcaggcagagccattagagcatcataggatgactgttccttttcagtaaggtcaggcatatttgtgccttcaaccactgacagcgttgggttaataataagctctgagccgtcttttaaagtcgctgtaaatttgtcaatagacatgttatgcgaggtaattttattctctgatgtaacagatgcgtttgacaggacaaccgcgccgctcatggcggttgaaccgttcttccaaacgtaagttatagttttatcgtccgttatagattttgaagtttcaccgttaccggcaaagctttcgccaaaggatacagagttgatttccgcattatcaaaagtggctgtaagctcaaatcctaaaatttcaggcagtgatgacgcagttttgaaaactaccttatatatgttgtcttcaccagttgtataaactgtcgcggtgactttcatatccatttcctgagcgccgggggtggctgtgggttcaggagataccgtaggctcttcgggttcagcggtggctgatggttcaggtgaagccgtagcttcagcagtttcatcagtgagcacagtgtctattgttgtgattgtttcgttattattctctccggcggcaaagactgccggagctgaaactgcggtagttaaaacagcggcggaaacaagaccgcagactagattgttcagttttttattcttcataactaacctcctgatatacaagaaaaattgtgtaaaacattaagcatagaattaattataacattcaaatatttaatatcaattaatcagcaattacaatagtgttacattcgacattatacgcatgttaatatatggtaaagccaaaacaaaaaatgcggaaactacttgatttataatattccaaatgttataatgtcaaaagctatatattgaaaggagcgatttttgtggctaaagagctgtcaaaaacctatgaccctaaggcggttgaggaaaaagtatatcaggaatggatagacggcgggtattttcatgcggaggttgatgaaacgaaaaaaccgtttactgtcgtcattccgccgcctaacgtgacaggtcagcttcatatgggacatgcgctggatgaaacttttcaggatattataatcagaacaaagagaatgcagggatataatgcgctctggattccggggactgaccatgcaggtattgctactcagataaaagttgaagaggatatgagagtcaatgaaaacgggctcaccagatatgatttaggcagagaaaagtttttggaaagagtttgggcttggaagaagaagtttggaaacagaattatagaccaattgaaaaagataggctgttcctgtgattgggacagggaacgcttcacaatggacgaggggtgcagcaaggcggtcagagaagtttttgttaacttatacgaaaaaggccttatttatcagggtacaaggataatcaactggtgcccgtcatgcaagaccgccctgtccgacgcagaggttgaatattcggagcaggaaggccatttttggcatattaaatatccgataaaggacagtgacggctatgttgagatagccaccacaagacctgaaacgcttctcggagatactgcggttgccgtaaaccctgatgatgaaagatataaggatttggtgggcaagatgctgattcttccgctggttggaagagagataccggttattgctgacgaatacgttgataaggagtttggtaccggctgtgttaaaataacgccggctcatgacccgaacgattttgaagttggaaagagacatggtcttgaggaaatcaaagtcttaaacgatgacgcaactatcaatcaatacggcggcaaataccagggtatggacaggtatgaagcaagaaaagccatagttgaagatttggacagacagggacttttggttaaggttgagccgcatgtccacaatgtgggaggctgttaccgctgcggcacaactgttgaacctatcacctcaaagcaatggtttgttaaaatgaagcctttggctgagccggcggcaaaagctgttgagaacggcgagacaaagtttatccccgaaaggtttactaagacttatatgcactggatggaaaacgttcatgactggtgtatttcacgtcagctttggtgggggcatagaatcccggcgttttattgccaggactgcggtgagacaattgtttctaaagaggacattgaggtctgccctaagtgcggcggaaaagttaagcaggacgacgatgtgcttgacacctggttcagcagcgctttgtggccgttttcaaccctgggctggccggatgatactgaggaactgaaatatttctaccctacctcggttttggtaacgggttatgatattatatttttctgggttgcgagaatgattttctcaggaatagagcatatgggtcaggttccttttaaagacgtgtatatccacggtcttgtgagagattctcagggcagaaagatgtcaaagtcgctgggtaacggtattgaccctctggagataatagacgagtacggcgcagacgctttaagatttactttggctaccggaaactctccgggcaacgatatgagattctatactgaaagagttgaggcgagccgtaattttgccaacaagatatggaatgcgtcacgatttgttttgatgaatctttctatagataaatgcgaactgtcagacagagataagctggagatttcagacaggtggattctgtcggaatacaatgatttggtaaaggaagttacagataatcttgataagtatgagttagggatagcggtttcaaagctgtatgatttcatttgggataagttctgcgattggtatattgaacttgtaaagcctagattctttgaagagggcgagagcaatataaccgcccagcaggtgcttgtttatgtactgtctaacacgctgaaacttttgcacccgttcatgccgtttataaccgaggagatatggcaggctttgcctcatgagggcaagagcataatgatttccagcttcccggtatataatagcgagtataaagacgaaaacgctgaaaaagaaatgcagatgataatggacgcaataaaaggaatcagaaatatcagaaatgagatgaatgttccgccgtccaagaaagccggaatctttataatcactgaggagccggagatatttgaaaacggtataccgttttttaagaagctggcgtacgcgtctgaagttaatgttataaaagacggcggcagcgttcctgagaacgtcgtgtctgttgtagttcccggagctgagattctgatgccgcttgacgagctggttgaccgtgcaaaagagatagagagacttgaaaaggaaaagaaacatcttgaatcagagataaagcgtgtcgagggcaagctgaacaataagggatttaccgaaaaggcgcctgccgcggtagtggaggaagaacgcctgaaaggtgaaaagtacagtgaaatgttaaagaccgttattgaaagcttagaaaagttgaaataaaatttattgcagtatatgtcagcgcttagggggctaatatggataatgtatcgatgggcggcggtttgaaggcagttgtatattgttctcataccggtcatgccaaaaaatgtgcggaattgttctcaaatcgtttgggagtgccgtgttatgacattaagaatataaaagggcttggcaggaacagcaatattgtattctttggctggataagggctaataaaataatgggctataaaaaagctaaaggattttttgatatcaagctgatatgcggcgttggtatgtgcaaaggcacggacagcattatacaaagcttgattgagagaaatgatattgataagccgttttattatgttcagggcggagttaatacggaaaggctgagcggagtttataaatggatattgaatatagtccgatttggaattggaaaagccgttagccaaggggtcagcccggacgaaagtttcgattctaaggctcaggcggagtatgaggataataaggagcttttaaaggatatacaatataaccgcgaccatataactgacagtgctgtggaagagctggttaagtattatcaggcgttaaagtaatgttatttatggcggcagggtatatcctgccgccatttttgataaaagattatgctgctgaggcatcaaaaaacgaattgttgggaggcactttggatgaaaaagcaagttaaaacaaacgctatgaggatattggagaaatcgggaataaattttgaggctgtattctataacagcgatggatttatggatggggtttcggtagctgaaaagctgggtcaggatttaagggacgtatataagacgttagtgacggagagcaaaaatcacgagtattttgtgtttgtcattccggtggcagaagaactggatttaaagaaatgtgcggctgctgtggggcaaaaatcgcttgagatgatacatgttaaggatataacgaaggttaccggctacataaggggcggatgcagtccaatcggtatgaaaaagcagtttaaaacagtgatagacttgacggcagaggagcgggaagagataatattcagcggcggcagactgggagtacagattaaaatggctccaggaaagctggcggagctgataggagccgaatttttagacataacaaaataacaggaggcgaggattggaatgagaagtataaaaactgatttaaggaatattcccggcgtcgggaaatcaatagagcaggatttaatagatataggtataaattgtgttaatgatttaaagggcagagaccctgaggatttatatctaagagacgcggctgtaaaaggggtcaaatccgatccgtgccttctgtatgtgtttaggttggcagtgtattatgctgaaaatgaggagcgggatatggaaaaactcaagtggtggtattggaaagacaaaaaatatccgccggagaaataaggtgatgtattcggcggatatttttgataattctatttaaagtattcacatattccggtataaattgcttctgcaagttttttttgatattcttcatctgtcagattttttaattcttcaggatttgataaaaatccgcattcaaccaacgctgccggaactttagcgtttttcagaatatatatcccggtttcgttctttttggcgacccgtttattgttgttgtcaagattatttattaaagacgcttgtataagctctccgagttttttgctgtcttcactgttctgtgaataaaaaacctgagcgccgctgtattttggattttcaaatttgttcatatgtatgcttataaataaatcagcgccggaatcttcaatcagcgataacctatataacaggtcgtcttttttgacatatttgccgctggtgttattgagcagtttaacttcgtcactgtcacgggttaaaagcgcggtgtttccgtcagagttaataacatcgcggagtttcagcgccacagccagatttatgtctttttccagaattccgcttgcggacgcgccgccgtcaacaccgccgtgtcctgcgtcaataacaataacttttccgctcgcttccgcattggtagtaacagcagggtcgtcatttaagccgaaaatcattatacaaatggcggcaatcaccataagcgtacctaatcctattaaaattaaactattctttttaacagcaaaaaacacataaatcacctcagttgattatatgtgcgtctatcctatactagaacgtataaaagcgcctgcgtacaatataaataataaaataagatttatagtcagtcttccgggcggagtcacagaccttctaggttaatcaaaacgagttactttgtatcacacctgcactacaggtgtagtcgcagacattgaaggttaatcaaaacaagtttctatggctcacacccaccaaaggtggggtcacagaccttgtaggttgtaaagaaatgagtatgtataacacacacttttcttaaaaattgtggtcacagccctaccgaagcttgcaaaactgcttttttatataaattattatagaacaattatatatttattctctaatgcggtgtatatggtgaacatcgggagggcgcatttatgcgccgtgttaggtgagccgtcatctcacgcgtagcgtgaattacttatggaaggttgttataatcctttttaattgcaaattcatccatgactgcgcgccttacgaggcaaactacgtttgcattgagtattcaaattattctttgagtattaatgttattgacattgtaggctataataaaacaagtcactttgtattatacccacctcgtataataaagtagtagttaatattgttcgattttaagggcatgtgctataatgttattagatactgtggattagttacacccacctaccacttgatggtttcttgaaggctctaaccacagtctctttatacatttgttaattagttagataccgcacgacggtttatttagaacgaggttacaatcgtaaagagtatctgtggaacagtatcaaatattttttcaaaggagtttttagtatgatttttgttggtatcgatgttgcaaaggacaagcacgactgcttcatttgcaattctgacggcgaggttttatttaatgcttttactattcagaacactatagaaggttttaattttctttatcaaagaattgaatctgtttcaaaagattttaacaaagtaaaagtagggcttgaagccacaggacattactcatacaatcttttgggttatcttcttgataaaggtttgactacctttgttatcaatccattacataccaatctcttcagaaagtctctcagcctcagaaagactaaaacggataaaattgatgcccatacaatcgctatgatgttaatgtctaatgtagacttaaagtcctactcagatatattatatcacaacgaagaattaaagtcactaaccagatacagattttataaagtttctgaaagagcaaaactcaaaaccactgtttcccggcttgtgaacatacttttcccggaacttgaaaaacttgttccttcgctgcatataaaatctgtctatactatgctttcagagttcccgtcagcccatcatattgcagaagcccacttaacgaagcttacaaacctgctgcatactgcatctagaggcagatatggcaaagatactgcaattggttttagggaagccgcaaaaaactcaatcggttcagacatgccagcaaaatctcttgagctaaagcataccataaagctaatacaagaacttacagcagaaattgaggagatagaagcagaaatcaagcatattatggataacataaacacgcctattctgtctatcccgggtatcagttacacaatgggagctatgatagtagcagaaataggtgatttcagtaagttttcatctcctgataaaatacttgcgtattcaggaatgtcaccatcaacgtatcagtcaggacaaataaccaatagctattcacacatggagaaacgaggttcgcgttaccttcggtacgcattatacaatgcagcaaaatatgtatgtcattgggatgaaaccttcaagaattatctggcaaaaaagcgaactgagggaaaacattacaatgttgcaatatctcatgcagtaaaaaaactagtgagagtaatctatcatttacagaaaacgggtcagagttaccaagccgtttgagtttatgtaatactgtatttttaatactatttttttaagcaatttactattgctttatttgacatacaattttctagtttccttatttgaccgaaaagattttaactttttttatttttctattgacttttaatagttagtctagaaggtggggtcacagacattgtaggtaaatcaaaacaagtgattttgtataacatccaccttttcaggtggagtcacacctaccgaagcttgcaaaactgcttttttatataaattatcatagaacaattatatatttattctctaatgcggtgtatatggtgaacatcgggagggcgcatttatgcgccgcgttaggtgagccgtcatctcacgcgtagcgtgaattacttatggaaggttgttataatcctttttaattgcaaattcatccatgactgcgcgccttgcgaggcaaactacgtttgcattgagtattcaaattattgacattgtaggtaaatcaaaacaagtgattttgtataacatccaccttttcaggtggagtcacacctaccgaagcttgcgaaaccacatttttatataaattatcatagaacaattatatatttaatttctaatatgtggtgtatatagtgaacatcgggagggcgcatttatgcgccgcgttaggtgagccatcatctcacgcgtagcgtgaattacttatgtaaaattgtcataatcctttttattacaaattttcccatgactgcgcgccttacgaggcagatgaaatctgccctgccgaagcttgcaaaaccacatttttatataaattattatctaatgcggtgtttatggtgaacatcggtaggtgtgaccccacctttggtgggtttgatacaaagcggcttgttttattatagccttcaacgtcaataaattacttagttgtgatgtattgcgtgcttgcacgccacgttaggtgagctgacagctcacctaacgtggcgtgaatattcacttattgtggtttgtcataatcctttttattacaaattttttcgttaaagaaataaatttgttttatccaggcggctgacagcagatatacacataaacaaaattataaaatatataaattaacagaattaaattaaaatcaccgcatatagttaaaatgataaaaatgtaaatttcatgaaaataaaagtattttaataaaacagcgagaaaaaaagagaaaatatcaatcattactaatttaatcgaaaataatcggaaatatatgcgttgacttttggtctttcaactagtataataatcgatgttgctgttaagtgcggcacacgaaaagatacgggagcatagctcagctgggagagcatctgccttacaagcagagggtcataggttcgagccctattgttcccaccactatctttttaacatatgggagcatagctcagctgggagagcatctgccttacaagcagagggtcataggttcgagccctattgttcccaccatatgtggtccggtagttcagttggttagaatgccagcctgtcacgctggaggtcgtgggttcgaaccccatccggatcgccattacagcttaagcaaattaagctgttttgcctctgtagctcagtcggtagagcaggggactgaaaatccccgtgtcggtggttcgattccgcccggaggcaccattttttgcgggagtggctcagtggtagagcgtcaccttgccaaggtgaacgtcgcgagttcgaatctcgtcttccgctccaactgataaaagacgcatatttttgcgtcttttatcataattattaaagcaggataaaaattttaaaatgtgtgcataattatagaatacaaaaatataattaaataaggcgccatagccaagtggtaaggcagagctctgcaacagctttattccccagttcaaatctgggtggcgcctccaatattatcggggtaagtttgcttgctccgatttttttatgcaaaaaaacaattgtccgttccgccgcttctcatttttttacaaaacctgcggttttgcaggagccctgaaattgccgaatgaaatgcaagatatttaaattgtttagaattgcaattttatcaataatattttgtgctttgccgtgttttcaagattaccgtttttataggcggtaatttttttattaacttctttatatataattgcttttgtatctgtatatctgaatctttacaatcttatcatggtatatcaaatatccaactatatcctataattatttcaaattttttgttataaatcatatttttaatttactgattttcaaagtttgcgacagatgacatttgattgacatatctgctgttttaaattttagtatctgctttattgtgtcagttcatattatgatattgtatttattgataaaatgggtattagtcgtataatctgaggatatatccgtagttatttattgttttaagttggttagactgcaaaatttaacttaaacaacactcccaaatgcgaaggggttatcttagtatgcacttctttataagcgtgaattaaaaaaattgacagccgtattaaaataaaaaatggatgtttataaattatatgggggtgttgtaatagatttatgttagcgatatactgcaagtaaatctacggtagccgtgagtgatatatttgtaggactttttaattgtgtttcatttcaatcttatatataaacggctgtttgaagtgttaagcaatttggggatataaaaaattcagattaacgcacacagtttggattgatgattttttatttctgatattgtgtatattaattcgcataaatttgtgcgacagggcagaatttgattgagtgaacaagtttgattaaatttatttcaactcaagtatcccgggcagatgcggattgtcttttatacaatatatattattgcaatattattttaatccacatcatcacaaagcttttaaccgtgttattttaggtatgaatttttcagtttacgaacctacacgggtgcggctaaagatagggaattcattggtgatattgccaacaaagcaaaagaactgactaatgttagccagctccggaacaataacaaagggcggtacttgccggcgtctgctttatcacagttataggcaagtaaaaacatcaaacgtaaaaaatatcaactaaaatacttactttaatctgtataatatttttatattacattaataaaggagaattttatataaatattttaattcactcatccatgtagatggcggcaaaataaaaaacgtttacacacgtcctgaaagagatttcaattcacaaacccatgtagtgaacaacaaaaataaattaaacttgatattataatatattatgatttcaattcacacccctgcaatggtgcggcaaaaaagccccgatttatcggagcttatttatatttcagaattttgatagtagaggtcatcatataatctttgcaataatatgccctcttcgttaaggtcgtaattatcatcaaaaccaatttctgttattttatcatctaaatctaacaggagttgatatatatcagtatatgattgtttcaaatatgtttttacaagttctttttgtttctcagtaataatcatcacttaaacttcttccttccggtcgttggtttaacctgtattaacacttgagtatcatgattaacggcaggcgttaacaagtcgtcaataaatctttggcttttcttatgcttcaactttctaatatcacctaattttgcaggattctgaagcacgtctaatacataattacagtattacgtttttgctcagccggccatatcaccaataatataaaatgctttgatttatttgttatcttcatactgttacttgcagtaatgccaataaagtttttatctatttcttttgctaatatttttacatttcaatccacagtcgcacccgtgcagggacggattttcaagctttttctgttaaatgggtatacttaacgaattttaattcacgcacccatgtggggtgcgacaacagttgtttcataaggcaccatataatattgtccatttcaatccacgcacccttgaggggtgcgacgtgtatagcgattatacgcttatacagagattttgcatttcaatccacgcacccttgaggggggtgcgacaaaagtgcgccacctattaacaaaaatgttaaagaatttcaatccacgcacccttgaggggtgcgacagcaaaaatatataaaaaataatatttgtattcctttaatctagtatattttgcttttttagcaaaatatataatataagattaattattacatacattttttattatatatctttgtttttaatggtgcgaacctcccggcaattttatgtgagcttaccattcgcacctatattattttataatatctttagagataattttaaatttataactttttaattggtttaatttcttaagcttatactaaatatgtttatttttttctgttacttattttatatcacataatgtaatataaagcaatacattttttaaaaaatgttaaaaaataaaaaattatattaaaatatagtaaataatataaagaggatattataaatacttggaataacaaatggtttaatatataaaatctacagaaataatatatcatattaaaaatgtttgactacaagaagatatataaataatttaatatttgatacttttatgatataaattttgaaaataataaaaattatggatgttaaaaatgcactctgtagtttaacacagactatacaaaaattttttgttattataattaaatataaaattttctcccataccgtatcaggttatattactagaatattctatgcagaataatcctttcaactatattttttataaattcagcatcttagaaaaatcttcatttacccaatcagccgggcataaatcagaaacagttcacttcactgaagtttttaatttaaatgtatttaaaagatgaaacaaaataattaatggtgttatggataaagcaataaagtatttaggaattggcataaccgataaaaaacgatttttctgattaaatccaaattagggattaattgtttgtcagaacttaaattcagaattatatatgatacttaagtaaattaagactaataaaatatattgataattaaagtatattatactatgtcacgcactggcactaaagttaatttacaatgataatagattcatatatatgatgctccgctgtcatgcgaaataacaattcacagcagttttgcggttataataactgacagcgtaaatttaaaaaaaataatataaaatttggggtggcattaccgtttgctgaaaaggcgggttgtaatgttgttccgtaacaggggtggcgttgccgttcgtataaatagggttgcagcgttgttccaaaggagaattcttatgggaaaagaagcatttgatttctttcctttagacgtgcatcttagtgataagatggagcttatagaagcagaattcgggttaatagggtttgcggtaatcgttaagctgtggatgagaatatacggcagcagaggttattactgtgaatttgatgaagaggttgcattgatgttttcccacaaaacaggggttggtgtcaatgccgtttctgaaatattgaacgcagcatttaaaagaggtatttttgacaagacgctgtatgagaagtacaaaattctaacatcaaaaggaatacaggaaagatgtatgaaaatgtgctcaagaagaaagcgttttgaagtcgagaagaaataccttttaattagtgtacccgacagctttgaaaatgtatacataaagggcgaaaatgttaacatttctgaagaaaatgtatacatttttacacaaagtaaagtaaaggaaagaaaagaaagtaaagtaaataaaagtaaagtaaatgaagtgccggaagcggaagagcacaaggatttaaaacacaagtatggaaaatacaataatgtgttattaacagacgaagagattaaacagctaagagaaaagctgcctaaagactgggaaaagtggatagagaagttttcggaaggcttggagcttaaggggtataagtataataaccattatttagccatacttcagtgggaggagagaagcggacagaaaaatgatgatatgagaaacagtaaatttaataattatacagacaccaacaagactaattatacagacaccaacaagactaattatgcaagtattgaaaagaaaatacttgccgatatgtatggcaatagttaaagtgataaaaacagagacttgctgatacagaaaaacaaagattaagagtgtaagacggctgacaattaaagattttgataggccgtgatataatttggagaatggaaatgtaactcattgtcaaaaaccagtcatacggtttgttattattaaaatttagcaatataaaaatttttgtatatgtaaaataaagcggtaaagcaacaaaacctccggttagcagtatgaaaacaagggacgaataatcgtgagtaattttagaaaattaaagctaaaataaaaattcaatatagtaagaaagaatgatattaattttttaagcaaaataagtccaaagtatgtttctgtatataattagttaaattgtatatttaataatgtattgatgaattttaccggaggtgttggaaactgaataatacaaataaaacagatggcaacaaaatcttgtaaatttttggaaaatttctttacataatatgttgtttatattgtatcctaatgttatctattaagttcaatcatcttgtttatttgaaactaatggactttgtttccgcaagaggatttaaagaattgaatttatctcaaataaacgtttttatttcccctatttcgcctagtgaagctgggatgttaaagccaaatgaacagtcataatttggtgcaaaatttgcttttacataatcaagattcagcagtattccattcttggcatatatggcaacgaatatataatcctttgtattattgtccttttttttgttaacactagtttcaacaataaaactagcattttccggaggggtttcaagtttatctcctgaaattgaaagaatggacaagtcttttatatcataaagatagttaggagaagctgtgggttgctctgtatttattggcgttgaatttatattattaatatttatatatataaatgtcttattgttatttatatcttctgcacatataatatattcaccgttttgatttactttaaaagaattgtttttaatagttattgtattcccgttatcattcggatatccggcatttatataatagtcataaataacagcagcattttcgctttctcctgttaattcactatattggtaaaaatctgaaagtaaaagattaatatccgtattgtagtctgccgatgtaatgtgtccatttgatattatgttcgaaggatttattttttgaactactttaacatagctcacatttttaatttcattatttgacataatttccaactgtacagcgacggattgatctgtattttctgtttcagatattgtaatatttacatttggagcctgagctggttttggttctgttattataccaccgttaatcttatctggagcactgtttttatcatcttctaaaattttatttccgtttatagtaaaatcattataacgatagcattttgaaatactgctttcttcatctaagtaacctgatatggctccaaagtgttcgccttttgtttcaatacttcctccagcatagcaattacttatactattgaaattctgaaaatatggtgggcttatttgtgcgccaaccaaacctccagcataatcactagctgctgttacgttacttgatgaataacaattgctgatgccgcttagtccaccttgcttacccactaatccgcctacgtagatatttccctgcactttgccggtgctgcatgaatttgctaggcttccatcgtataaatatccgattagacctccggcgagatcgtcagaacttatgacatcacctgtggcatagcaattatgagcagttgccattccctcaagactgcctaacaatccaccgcagcagcgttttcctttaacattgcctgaggcataacaatatataaccgagccgctcgcaattccaatcaggccaccgatattgccgtttaatagactatctttttcagatataacgtttgtttttgtgtaacagttaactgtagtgccaagtacatcttggtttccaatcaaacctccaacattgtttgcaccacttacgctgcttcctgttacatagcaatttctgactttatctattgtagcataaacaccaattaaaccgccgacattactgttgccggatataccattttcagcaatttctatgccaagattttgtatgcatgtatcattattataggaatttacaccgccgaaaagacctatattatcagaatctgttcggtttatccataaacctgatataatatgatatgctccttcaaagcttccagtaaaatatccgtttccataaccgtctgggtttcctataggctcccagccttctttgttccatttagcataaccttcaccgacgtcgctaagttattcagttaaatcaatatcgtttcctagtttgtaatgagctgataaattgttgcgtatttcatcaagttcacgagctgaagtaataatatacggattttctaaggtgccgttaccggttagccttatgcttttatcattttggtttatattcaaaaaatctgcataaacataggaaaaggttgctggtaatgctattaaaaatattaaaaataaacaaataaatttcttcatcattttcaacctttcttttagaattaattttttataattatgttattttgatattataagataattattgtattttaaaatttattcagaaaactattcaacccagaagtcaattagttgttcttgctcaagtgtattaccgcctaatgattgaatgttgttactaacaaccaatgcataatacatttgcggagtatatccatcattgggctgttctaactgtttagtaagtttgagatttctattcagtttgacaccttcgtctattttatcgaaaatattttcgtttgcatatacaattgagttacacattttatttgagattataatcaataaatatagaaaaatacttaaaaatttttttataataattatccacttgtaaattataaaaaatactaaatttatttcgaatcaaatgttttgtgtgacaacttttcaaataaattatattttatattattatttagtgtataatcaccacctatgtattataaattttatatattataatacattatatattatatattgtaatattcaagcaaattatcataatattactatgttttttgcggttttaaatataattattatttcaaaaaagtataattgataaataaagctgttctatattttttatatttatttttattttaagaaaactgcaaaatacaattctagtaaaaagcaaaagaataagtttattaaaattttaaatattttttattaaaggattatttaaaatagattctgttgggaagttacttaatctaagcagtgacagaaagtgtaatattttatcaaagaatatttttaatatatttatcagttcatactcactttgatgtttatatatagaattaataattttatgaaaggaatacaaaatgaagagcacacagaccatatggattaaggtatatacgtaacataatttacaaattcaagaataccattaaatgttatatcaggctgggtagggcataaaaatgttgaaatcacacaagactataatcacattttaaagactcaaatagataagggcgtaacattattggaaaattggtaattagaagcagaatggtgtcaaaatggtgaaaataataaaatgatgatttataattaacgttattacggaaacatatgtataatataaaatttattacaaaattcctcaaaatcccttgacagaatagaaattaactagtataattgttcgagtagaatttttttgacttctaggtgttgtataatactcggagggagggaagaaattatggcagaaataagagtaaaagaaaatgagtcgcttgatagtgcgcttcgtcgttttaagcgttcttgcgctaaggcaggtgttttatctgaggttagaaagagagaacactatgaaaagccaagcgttaaacgcaagaagaaatccgaggctgctagaaaacgcaagtattaatctgtttttctgttaatgacattccttgtcttttcatagctgtagctttgagacgatgttatataattaattgttagttaatttagaatgttaattaaattgatttatttagggctgtagtaagatagttgcaaaatattatgtgattttttatattgcaggatattttaatttgtatttattacttaagtttgcttgggttatattagtacaggagctgcaacttcaggattttatcctatcttagctgcagtcctttttatttacctttttggaggattgtatatgggtaggtttaaagataaatttaagccggatattttttgtgatgatgtatatactttagatattgaatgtttaaagaaaataggtatcaaagctcttatatttgatattgataatacattggttacatatgacgatttaaaggcgcctgaacatacaaaaaaatggtttgaaatgctgcatcaaaataatattttaacttgccttgtttcaaataataataaagagagggttgaaaattttgcaaagtcgctaaatgaaccatatttttatgctgcgcttaaaccaaagaaaaaatatataataaaagcttgtgatgtgatcggtgtttctccaaacgaagcagctttggttggtgaccaactgtttacggatatttatggaggcaatagattaggtatgtatactattatggttaaagctatctcagataaagaaaactggtttgtacattttaaacgcagtttggaaaaatattttttaaaggaatggttttgatgctggaatttaagagtgaaagttttgctcaatttggtcctgccggaaattcagatgatttttttgaagaaggaaataaatccgtttatgatgttccgaaatggctggaaaaaaatggactgggtgcgtatgaatatcaatgcggtcacggggttagaatttctgatgactctgcaaaagatctcggcgatattgcagaagggaaacacataagattatctatacatgcaccttattatataagtctatcatctgttgaggaagcaaagagagataaaagtatagaatatattttgcaaacgttaagagctgctaaatatatgcgtgctgataggattgtagttcattcaggttcttgcggaaaaataactagaattgaagctcttaaacttgcttcggatactctgcgcagggctgttaaagccgctgatgagaacggatatggcaacatacgcatatgtccggaaacaatgggaaaagttaatcaattagggaatgttgaagaggttataaaattatgtcaaattgatgagagatttttacctactcttgattttggtcatataaacgctcagtctttaggtaaatataatacaaaagaaagtataaaaagtatttttgatttaatcgaaaataaattggggtatgagcgtgctaagaattttcatgcgcattattcaagaatagagtatacaagagccggcgagaagaaacatcatacaatggcagaaaccgaatatgaaccggactttgaaccgattgctgaacttattgcagagaggaactatactccaagaattatttgtgaatctgcaggaacacagacaaaagatgcgtgttcaatgcaaaaaatatataaagaattaattaataaaattgattaatatattaggaatcaggtgtttattatgaaaaatatttttgaagagcttaagttgagtaacgagactgcagttttgatatgttcaccatataatatgaaatattttagcggattttcgggcggagaaggatatgttataataacaaaagaaaataaatatctattagttgattccagatataccggaatagcaaaagaggaagcgtataaagactttttgatttttgaatttgggcttaattatccattagctgatatgttaaaaaacatacttttagaaaatcaaattaaaaacttgatttttgaagatgattttatttctgttaaagttttcaatatgtttaaaaatatagcggataatattgaattttgtcctatgtctgatgatattaacaaaataaggatgataaaatcagatgaagaacttgaattaattgcaaaagctgaacagataggtgttgatgcttttaaacatattttatcttatatcaaaccaggtgtttctgaaaaagatattgctgcagagcttgagtattttatgaaaaagaatggagctgaaaaaacttcttttgatacgattgttttatccggagaaagaactgctttaccccatggcgtgccgggggataggattataaaaaatggtgatttccttcttatggattacggatgtgtatataacggctattgttctgatatgacaagaacaattatgattggaaaggcagataaaaaacaaaaagaaatatataatactgtactaaatgcccaaatgacaggattgaatgttttaaaagcaggaattggaggtttttctgctgataaagccgcaagagatgttattgacgaagcaggatatggagactattttggacattctctcggacatggggtgggacttcaaatccatgaacttccaaatttatcaccaaagtctgatattatattagaagaaaatatgatagtatcctgtgaaccgggtatatacatttacggatatggcggtgtaaggattgaagatttagtatgcgtgaaaaaagatggaattcgaaatttaacaaatttatctaaagaactaattgaaatataatttttggctccgcaatttagcggggcttttttatacacaaaattcattatcttgagtataatatttcaggagagtgatgatttcatgaatggatattacagagagtttatgccaaatgaaaaagaggataatacgcagaaacaaaaaactgctggtttacctaatgaaagtttagaaaataataatatcagaaataatgcaattaattcacaaaccaatccacggaatgtttcacagacgaatccgcaaaacaattcacaaaccaatctacggaatgttccacagaccaatccacaagcaaatccacaaaccaattcacagaccaatccacaagcaaatccacaaaccaattcacagaccaatccacaagcaaatccacaaaccaattcacagaccaatctacaaaccaatccacaaaccaatctgagaaccaatccacaaattaattcgtcaattaatccacaaactgttacacaaactagtccgcaaaataattcacaaactattccacagactatatctgaaaataatgttagaactattccggaaagtattagacaaaacaataaccagcaaacagcacaaaataatcaaaacttaaatcaggttccgaccgcaaacaataataatgttcaaaacaatagtaacttgcagaggaatgcaggttcagaggggaattataacgaacatttatcacgttttaatgaacagcttggagcgagtataaacgttaataatcaatcaaatgaaacatcaaatagacaaaattacgaaaacatagccgaatctgaagtggaatcactggaaggcggtgaaaacagtgagactattagagttccatatactggtaatgggaaactgatagtacaggttactttagcaagacaggcgatacctttggagaatgcaaaagttacagttaattcgacaaacggaagcccaatagaaataaatgaagtaagatatactggtcaaaacggaagaaccgaaccgattgatcttcctgcacctccggtttattattctaaacaaccgcaagaaaaagttcagccatatgcagtatatgacgttaagtctgaacttgacggttattacacaatagaaaatgcaaaacacgctttagtgtttgataatattgcctcaatacaaaatatagaaatgatacccaacgaagaaaacagagactaatttttggaggtgattttgtggatttggagttaaaaattccctcaactgtcgtcgttcatcttggagcgcctactgatagttcagcgcaaaatgttaccataccatttgttgattacataaaaaatgtcgcatccagcgagatattccctacttggcctgaaaatgcattaattgctaatatttatgctcagattacttttactcttaataggatatttacagagcattataggtcgcagggatatccgtttgacataacaaatttagaagcttatgatcaagcatatgtttatggtagggatttttttgaaaatataagtcaaatagttgacgaaatatttaataactacataacaagagaaggaaattataatccaatttacgctagatattgcaatggtactacatcactttgcccaggaggattatcacaatggggttcggtagatctcgctaatcaaggatatgctcctatagatatattaaaatattattatggcgatgatattactttagtagaggacgctgaggtagcggacgcaagggaatcttatcctggccagccgttaaggcttggcgacaatagtcttgaagtaaaaggcatgcaggttagattaaatagaatttcaaaaaattacccgtcaattcccaaaatcgcatttcctgacggatattttgatgttataaccgaagatgcggttaaggattttcaaagaatatttaatctgacagcagatggaataataggaaaagcaacatggtataaaattataaggatttataatgctgtaaaaaaattgtctgaactagatgctgaaggaatttcattggcatttataaaggaacaatatacaggaacacttcgtaatggcgacacaggtcctggcgttgaaatgatacagtattatcttagatttataggaacttttaatgatttcatacccgctgtcacaacagatggtgtgttcggtgatgctaccgaaaattctgtaaggtcatttcagcaggcatatggcttggagcagacaggtgttgtaaatgaggagacatggaatagattatattcaacttatttttcgattttagacggcctgccgccggattttaaaggtgaaaattttgttcctttcggaggaacggttttataccgtggtgccagcggagatgcagtaagaactttacagaacaatctggcagaaatagcaactgtatatactgatataccaaaagttagtgtaactggatattttggccctgagacggagcaggcagttattgcgtatcaaaaattatttggtttggctcctaggggaactgtaggtccgattacttgggatagtattgccagtctttattctgatatcgtaaatggtaatctaaaatcacccggtcagtttcccggttacgttttatcagaagaataggaggatgacaatgtggtcgattaatgatgatatgagaaatatatttgaactgcaggtcatgctgagggaattaaatagaacattaggtatacgattaattaatcctgatggcatatttgatcatgaaacaactgaggcggtaacacaagtgcaaaaaatagccggtatagaaccgccaaacggtgaagtcgatcttttaacatggaacgaaatagtttctttatttcgagggtaaagtaaaattttaatttttatcttgacataattatagataaactttataatattaagttaaataaggggaattattaggagggagagatacttatgaaaaactataaagagagattcgatttcaaaacttttgttcgatgcggaatgcttactgcacttgcctgtgttttgacaatggtaccacagattcctacgggtaccggaggttatgtccatttcggagatagtataatatatgttgcctcagcatttttagggccgatttgcggagcagttgttggagcggttggacattctttggcagatatattaaccggacatataatttttgctctgcctacttttattattaagggtcttatggggtttgctataggaaaacttttatataaaaacttttcaaaaactcgttttattatgagtgcggttgcttctttggcaattgtaactctaggttattttgcagctgaaattccaatgtatggagtgtcagtagcagccatatcattaatttcgtcaccaattcaatggctgatgagtgtggtagcttcagctgttattgttcctataatcaataaatataggactaaaattggtctataactaatagagacagtgcagtttatgaattgcactgttttttctttaattaaaaagcagaagtctttggatataaaatcaagcatataatggattttaagaaaaagcggagatattatgctgtttaaaaagtaatagctgtataaatatctttgtcaagttatattagatgttaaaatcattatagaacttataataatattgaaggaaagctcataatgtaaatttttgttctataaattgtttattaaaaagatacttacagaaatattttaacagccccaaaaagttacgctaaaaatataactttttggggcaatattatttttaggaatattttcctattatctatttaataattagttctacagggcaatggtctgaaccgaaaatttcttgatggattaaagctgaatctattctgtcctttaatttttcagatactataaaataatctatacgccatccggcatttttttcacgcgctttaaatctatatgaccaccatgagtattcgccggttacatcaggatgaaggtatctaaaggtatcaatatatccttgatttaataattttgtcatctcttcgcgttcttcgtcagtaaagcctgcgttttttctatttgtttttggattttttaagtctatttcctgatgggcgacatttaaatcaccacagagaattacaggtttcattttttcaagttccgcaatatatttgcgtaactcattttcccatttaactctaaaatccaatctttttagttcctgctgtgaatttggcgtatagcatgttattatataaaaatcagcaaattctgctgtaatcagtcttccttcagtgtcatattcgtcaatccccattccgtatgaaactgatatgggttgtgttttcgtaaacagtgcaacgccggaatacccctttttttcagcatagttccagtattgactgtaaccgtcaaggttatcaagctgtatttgtccctcctgaagctttgtctcttgtatacagaatatatcagcgtcagcagatttgaaataatctaaaaatcctttttgcacacatgcacgtaacccgtttacattccaagaaatcaatttcattgtatgttttcctcctttgtaatgttaaaaaattttaaaccgttttgatatgttatttcacacagctgctccaactctatacctttaacttcagccattttttcagcgacgtattttacatatctgctgtcatttcgtcttcctctaaatggttcaggcgccatatacggactatctgtttcaatcattaatctttcaattggtatgacttttaaagcttcaatagcgcgttttgcatttttgaaagtgattactcctgtaaaagaaatcataaaacccatattaattaaaatctttgcagtttccgcgctgcctgaaaagcagtgaatgacaccttttgtaacattcatatctttcaatactttcaatgtgtcgccttttgactgtctgtcgtgaactattatgggtaaatcaagctcttttgcaatcaaaatctggttttgaaaacaattaagctgtgattcacgcggggcggagtcatcataataataatcaatgccgatctctccgattgccttaacttttggctcagtttcagcaatagttttaattttttgaaaatcttcgtcatcagcgttttctgcaaactcaggatgtataccgaccgaagcataaataaagtcatgggaattagctatattaacagcttttaatgaagtttcaaggctggacccaacctccataacagtttttacatcattttcccatatctttttaattatttcttcccggtcattatcaaattgttcatcatcgagatgtgaatgtgtgtcaaataatctcataaaatttctcctaaaaaaataatttacttgattatagcatatcgttatgttataatcaaatgaaatttaatatctttatttattttatcaatacacagtttgttgtatataatataaataagatatttggcagaaaatggagtgatttttgtggaagaattgatagaaaaaggcaagctcgccaaatctgcgtcaagagttcttggcagtctgtccgcttcagtaaaaaataacgctttactcgctattgcagacgctttggaaaaaaattctgaatttattatatccgaaaataaaaaggatatcgatgcaggcagaagaaatggtatgaaagaaagtctaattgatagattaagtcttaatcaagccagaataatagatatggctgaaggtatacgccaaattgctggtttgccggatcctatcggtgaagctatctcaagtataaaacgtccaaacggtcttaaaatatccaaagttagggttcctcttggagtaatcggtataatatatgaagcaagaccaaacgttactgccgatgcagccgggctttgtattaaatctggaaactctgttatactccgcggaggcaaagaagcgtttaaatccaacatggcaattgtaaaagtaatgcaggattctggttataatgctggtttgccggtaggttcaattaatttggtagaaaacacaactagagaaagttcaactgagttaatgaaactgaatgattatttagatgtaattattccccgcggaggtgctgggctgataaaagcagttgttgagaatgcaacagttccgtctatagagaccgggacgggtaattgtcatgtatatgtcgattcatatgctgaccttaatatggctcatgatattgtcataaacgctaaaactcagcgtccatctgtttgcaatgctgaagaaaaattacttgtacataaagatatagcagaaaagtttttgcccaaaatgctgaagtctttaagtgataaaggcgtagaaatagttggtgatgaaaaagtttgtgagatatatccaggtgccacagaggcaacggaagaagattggggaacagagtatcttgacctaaaaataggtgttaaggtagttgacagtattgatgaagctatcaagcatatcaataattataacagcggtcactcagaggctattgttacagacagctataaaaattctcaaaaatttcttgataaaattgatgcggctgcagtttatgttaatgcttcaacaagatttactgatggattcgaatttggattcggagctgaaattggcattagtactcaaaagactcatgcccgcggtcctatggggcttaaagaattgacctcaacaaaatatataatagaaggcagcggtcagataagataattaattacaggaggtaagatatatgaggatagaaacaaaatgtatacagtcaggatataagccggaaaatggtgagccgagagttctgccgatttatcaaagcacaacgtttaaatataactcaactgagcaaatgggaagattgtttgacttagaggaaagcggatacttttatacccgattggctaatccaaccaatgatgctgtcgctgctaaaatagctgacttggaaggcggagttgctgcaatgctgacctcatccggacaagcagcatgtttttattcaatatttaatatttgtgaagccggggatcactttgtttgttcttcaaccgtgtatggcggaacttttaatcttttcggtgtaactatgaaaaaacttggcattgatgtcacttttgttgacccggatacaagcgaggaagaattaaataaagcatttaagtcaaatacaaaagctatgtttggtgaaactattgcaaatcctgctttagttgttttagatattgaaaaatttgcaaaagtagctcacgaacatggagttccgcttattgttgataacacttttgcaactccaattaattgccgtccttttgagtggggagccgacatagtagtgcactcaacaacaaaatatatggacgggcacgctacctctgtaggcggagccatagtagacagcgggaattttgactgggaagcgaacagtgaaagatatcctggattgacaacacctgacgaatcatatcatggagttgtttatacagagcgattcggaaaatcagcttatatcatgaaagcaattgctactttaatgcgtgatttggggtctattcctgcgccccaaaattcatttttgcttaatataggccttgaaactttggctttaagagtagcaaaacactgtgaaaacgcaaaaaaagttgcagagtatctaagtaaaaacgataaaatttcatgggttagtttttcaggattggagaacgataagtatcacaaactcgcacaaaagtatctgcctaatggttcctgcggagttatatctttcggagtaaaaggcggtcgtgaaaacgcagtaaagtttatggatggtttaaagttagctgcaatagttacacatgtggcagatgcaagaacttcagttttacatccggcaagtcatactcatagacagatgaatgatgaagaactgaaagcggccggtgtaagtcctgatttaattagattttcagtaggtatagagaatgcagatgatataattgaggatatccagcaatcattagataatatttaatataagaattttgtataaatttatataactacttttttattagttaatatttatgtctgtgaaattttgagcggaaaatgatagtttacaaattatatagtacttgatattagtatagtaaaaactataagtttaccggtgatctgcacaatttctatagtgggcgaatactgacttaattaaagaaagaaacatcgaaatttgactctttgttacaaacttaacagccgctcaattgcggctgtttttgtatatttgttttgacaatttttaaattggtatatatactcttttatgcttatctgagccaatgtgttatcctattcaaattggtttctaatgtagtttgatattgtctgattattccagtttaacgaatctatataaaatgttgtacaataaatagtatttaaaattaatgtattttcaagtaaaacagaaaagtttgaaacaaattagtggcagatagaagcaaattataagcaatatgttaacaaaaatactaaatttatgggaattgaaagtacagttggatatacagaaaagaaacttatgatatagatagacatttttcacgcttataatataattggaattttacatgcaaaaaaatatttgtatcacttaaagtagacaaatcagaatatatcaacgcttatataataagtatacagattaatttaaaagattttaattatagtgataaaatgaaggtggaaagagcagacaagcggtaatattgagtttcttacgaggttgtcgatagaaaaataattgtgtctctatatcggcattgaaaacatttgaatcagagaaaacttaaactgagtagtggtgacccgccgaaacttccaatagattttggagcaacactgaaaatccagttaaaaataagctgagttcagattttaaaggtgtttttttcaacaatgagccattttgataaaaagtataaagtatgagagcacttagataattttatttgaatatgaaatgtattaagaattttataatatatctttataattacaagattacaacatataattaaatataccaaataagcttcttataaattataaaaagcctatttttataattatataaagttatttgacctatttacctacataatcttcaactatataatcagctttaataatttcttctataaataaatttaagtctatcccgacatttattatcatattaattaaactcccaaatgacggaagccttttcccgttttctaagtctatgtattgacgtggtgacagacagcacttttctgccactttcttttgatttaacttaagttccattctcctaaaaaataatgtctttccaaagcatatttttaatatgttcatcatttaaccaccaatctacaaaatatatgaatattctatcaataatatatttataaccatatgagatatattacacatgagccttgtttttcagctatccaagtaagcggagatatggtaagatgttaaaaaaagaacaaatttggaaacagtaagaaacataatatgcgataatgaacaaaatagtattaaaaatacaacgatttcggattataatgaatacagggatttagtgaaaagttgggactctaattctaatggtaataaaaacaatgacatcggaacgtatgtaacaacaaatctagacagcaacacgataagagtagaaaaaacatattgggataagttaacaattattattttactgattttaacttcagataatggtaataacggtagaatattagatgaatgttattatatagagcttaacaattaagatcctaattttgatacttattgtcagggcgaaactttacatcattgtctccatttattaattcatagttgtaagatctatcggtggtttggtatgcaaattgtttttattaatgtctgaataagaaatatctttaatatcaaacctcggtatattagtaacagcaaggagcatatatcaaagaaaggatggtagatgggtatttaaatatcaaaatgaagaaatggttaagcctcattatggctatgctaaaacagaatccgcagtaaaaagaaaacttagagagtataaaaaagaggttgcaaaaggcaattttgaaacacaagattcgtatatgttatttcaagattactgtttggactggttaaatagtgtgtataaaaataaagttattgttactacattttctgaaagaatgcgaacatataatagatacatacttaatcaacccattggtaaagtaacattaaataacttaactcaaaaaatgattcaaaaacatattaacagtatagctgaagttagtgttaatgtggcaaaaatagtattatttttaataaaaagcagtttatgttatgcatatcaggcagacaaaaaaataatatgtttgttcaaaatgtagttattcccaaatatctagaagaagaaaaagaaataaaagaaagagaagtatagacggtagaagaagtaaagaaaatagaagaatatgtttataatgataataattatgatgattctaaaacgtcaagaaagagacaattatatgattattaaatactgtttgttctgtatacagggttacgtataggagaatataaagccgtcacctatgaagatatagatttttacaataaggaattgcatattaattggtcaatagcaaaaatcaaagctcttgatactggaaccatgaaaatacaaaagaaaaaccaaaatcaaaaaatagtgtgcgaacccttccattgaaatcaaaggcaatagaagtaatagaaaagataataaaaatacagcaaaaataaggagtaacattattaaaaaattggtgatgaaaagcagaatggtgtcaaaatggtgtaaataataaaacgagactttagaaataacgttattactgggatgttttcgttatataaaattttattaacaattttatattttctcttgactaaatcaaaatctaaggctataatagtctggtatgctaatgttgctatgtttatacataggttttgtgtttgtattttgtttgcatacattatattgttgtccggcgaggggtgattatatgttggggagtaagaaaaatatcgcttctgcatcagcagttgttgcggtatttattttgttgtccgcattgttttcatttctgagccaggctttaattgttgaaaaatctaaaactgagcgtattgtttccatttctgattgtgctgattccggtatatctatgagcgcgcctcctgatatggaaagccatcccggaaacagtgatacgtttattatatccggtaatgttattgatagaaatttaagaacagattcatattttggaacgttttacaatgaacagtctatagcccaaagatgggtagacggtgaaatagcttgtataataagtgagcgaacatcgtttaatgttggaagcgttgtaatgatttgttaaggacttctatttataaaatcgaaaaataattaaaatatatatgagcaaaactcaaatttaaggaggagaagaaattgtccagaagtttagtgaaatttgcggctataattttggttattgcggcacttttctatgttggattgtatggtcttgattttaccgagaaatatagaattcccggtataatggacagtgatggaatcactcagggcctggatttaaaaggcggtactgttatagtgtttaaggcggatacagacgagccgtctgaagaggatatggataacgttgttaatctgctgagaaaacgtcttgattttcagggttatactgaagccagcgttactatgcaggggtcaaacaaggtaagagttgagcttcctgatgttcaggattcagacaaagcggttgaaactctcggagcaacagctcagcttgagtttaaagatgctgacggaaatctgattatgacaggcggcgaggttaaagacgctaagtcggaatatggtcagacagagcagggaatatcaaagagttcatattatattagtatgacatttacagatgaaggtcaaagtaagttctcagctgctacgaagacagcagcggctgcggcatcatcaggtaagaacttcatttcaatagaaatggatggaaacattttgacagcacctcaggttaagcagcagattgacagtgagacatgtattatcacaggccagtttactgctgaggaagcaaaagctctcgcagctaatattaagtcaggtcagcttcctttctcattgaagacagacgaggttaaggttgtaagcgctacattgggtgaagaagctttatcaaaggcaattacagcgggtattattggtttgatacttgttcttttgtttatgcttattgtataccgtatcatggggcttatggcggatattgctttactgttttatctttcaattgtacttattttgcttgcaaacttccacgtaaatcttacgctgcccggtatagcgggtattatacttgcgataggtatggctgttgacgcaaatgtcgttattttcgagcgtgtaaaagaggaattaaagcttggaaagacagtaagaagttctgttgagtcaggatttaacagagcattgtcagcagttatagattcaaatgtaacaactatcatttctgctgttattctgtggtggcttggaacgggaacaattaagggatttggtatgacattgcttatgggtgttatcgtttcaatgttctcggctatatttgtaactaagttcctgctcaaacagatgataggaatgaatgttagaaataactggctctatggtgttagtaaaaagaaaaccgggtcagaaagtgtgaaaggaggagaagcgtaatgtttgatatattaaagaaaaaatggatattctttggtattgctattgttttaagtttaattagtattgtttctctgattttccaaggatttaatcttgatacggatttttcaggcggtatagcattaacatatgaaataaacggagaattcactaccggagatataacatcattggtaaatgacgcaattgaaggcaaaaaggcatcttctattcagaaagccggttcagatgttattgttaaagttggatatgataagaatatgacagatgatgaaagagcagcattttccgcatctgttaaggaaagtcttactaccgctttagaaggtagattcggagccccggttgttgataatgaaaatcagaatacagaggcagtcgctgaggcaacagcagctccggaaacaacagctgcaccggatgaggccgcagctgcagaagctacagcgcttccatcagctactccggattctttggaagcaacatcaagaggaacattgacctcaggagttagacttaagagtcttgatgatatttctccttcttcgggtcaggaattggcgcgcagcgctatgtggatggcattgcttgcttgtgcaggcatactgatttatgtaaccatcagatttgagtttacatcaggatgtgttgctataatcgcattagttcacgatgtattgattttgctcggtgtttattcattgttcagaatatcagtaaatattaactttattgcggcggtgctgactgttcttggctactcaattaataatactatagtaatcatggacagaatccgtgagaatacacgtcattccagaaaagaaacatatggcgaaattgctaataacagtatttggcagacaatgactcgttctatcaatactactataacaacattgcttaccattggtatggtttatataattggtgtttcggctatcaaagctttcgctcttccgattattatcggtattgttgttggtttcttctcttcagtatttgttaccggtccgctttgggctacatggagagattctgctgttaaggctaaaaaagctaattctgcttcgaaagccggagctaagaaatctaagtaatatttgttttattataactgcatcgcaatttaactgcgatgcagtttttttgtaaagtttaaataattaaagtaagtttgtttcggaaacttgtttttggaacctactggaaaataaatcgtttaaataatattaacttttataaaaggagtgaagcagtaatgtttagttgcagaaatttaaataatgggattttaataaagtgttcagtatttataattggtttgattataatatcatgcgttttattcacaaaagtatacgcagccaacggtgatataaaagatactatatacacaactgatattctcacacaggtggatggtaaaaatatacaaagctattcgataaacggggagacacttatagcacttgaggacttggaaaattacggttatacggtctattataatgataatatacggtcggtgtttataactaaaaccggaactgtcaatccggattataatcccagcattgagcgcggaaaggttgggggaacagcgggatacacatatgagacagatataaacgcctatattaacggcaagttgatacatgcttatgcaatagacgggaaaatggttgctaaggtggaagagatgggaaccagtgaaaaccttagtgaggatgttaatacaaaatatcaaatgagctatacatatgatgactcaaaaagattgctttcactgtttacctcgcttaagaattcagtttcatatgaagaagctgtttctcattatttgagcaaaacattggcgtgggaggaacattacactgaaaatattcacaatgaaaacaactggctgattgagaaaggtattggcggactgcctcacggcggatactataacactatgaatcttatatataaatcaggtcttatagtcgaccttgaatctgtagtaaattcatactatctaagcaacgatattgagtacacctttagtcctgacggttcaaaattgttttttattaatcaggttgatggggtaaatgaatataagcagattgatttgactacattgatgatttctccgtcaaacagcgatgaatatttgagcgctagatatttagctggaatttctgattttaccgctgatgtgaatggggtcaaaatacctgtttattctatcggaggaaatgacgcggtcaaatttactgatttggaattctgcggatatgatatgggccttgatgaaaaatccagatatggatttgccgtgtataacagtgataaaaaattaaatcaggacaagataaaaagtgcaagtataagcggcaatgctaaatatttgaaagcgatgagcagtaatcaaagagattttttaatttatattaataacaaaagtatgataccgtatgatgttgatggtgaatattatattttaatatctgatatcaatgattctccgcacttcacatcttatgattatcaaataaacaacaccgaaatgaattataatttagatgattataaaattgaactaaaatatataccttcggcttatgatgatatgaaaataatgtgggacgattatttttatggttcggagctgggaaactgtgtagccgaatatgagtataaaggaaataagatttatgcttatctttatgagtatgaatatacaggttccggcacaccggagaagaggtacagttatagattgattgaatttacacatgacaatataattgcagagttaactcaaattttaaattcttatatttatgaaaatgtagatacggaatatttaaatgtaaataactatgataagttaacttattattttgattttgattctgtcaatggtattttaactattaaaatgtcagatggaagcaaatataacttagatttaaatacatatttaattgcgaaataataataggagtaaatgctatgaacatttgtgtttttggctctgctaaggaatttaattcctcaataatggcagaggcaaggaagcttggaagattaataggaagcatgggatacggattgacatatggcggattcggtgaagggcttttgtcggaagtagccaaaggcgtgaaggaatatggagggtatatcacaactgttgcacctcaaacgcccagacttaataatacattgtttcaggaaatcgatgaattgattttgtctgaagataaaagaaaacgtaaagaactgcaggagaaaaattcggatatgtttgttgttctacctacaggaataggggtattggatgaattgtttgaaatacttgttttgaaaagctacggcgaactaaaacaaagaattgttattgtaaatattgaaaatatgtatgataatcttaaagttttgctgcaggatatggacgctatggaatattgtgattttgtggattccgttgacagaatattatttagtggtaaccagcagttatatgattaatttattaaatgttttaagttaaaaaatagatataaactcatatttcgcttatgtcgaaaagttctttttcgactttgtgttttataatttataatactgaactaataaaatactattttaactatagtatatattaaaaactattataaaatattttgaattcagatcattgatagaatattttgagtgggcaaaatttatttctgagtctgcacgatacagcaagtgcctaccgttatagtatgttttaaaaatatatgatttctaataaggtgcggtataattgctgaagtttttgtaatattgataagcaccttctttgttttgtgtttttcattttgtcataaatataataacaaggtcagcatttgctgaccttgttagatgggctgaggtgctgaaaaactaaaatccaactgtcataaaaaaacagcattgtaaaatggtttacagccccggttgtacttccaaaagtactaacctttgaggtgtatatcgttggttttcggcgaaattttttgttttacagttccatagtctccggtatttcacaggaagttgaaagctctataaattttccgctgtcattgctttcgtggactgagtgcatgatctcaagcacgtgaagagcttttttaccgtccgcctttagattttttcgtccttctgaaacacactgtgccatatcgctgacacctattccacggctgttttcagcattaggaaacagcagaggaattttctcaaatccttccgcaaactgttgcttaactaaaacatctcctccaaaggtatttggatcaggcactatcatactccctctggttccgtacacctctattctcggcagattgcttccccatacatcaaagctcgttattatgtttcctattgccccatttttaaatctcataattccgcatacatgtgtaggaacctctacttttattagctcgccgtatttaggctgactggttatcatccgctcaggaaagctcattgacgtcattccacatacctgagaaacaggtcctatcattgatacaagagctgtcagataatacggtcccatgtcaaacataggcccaccgccctttttataataaaattcaggtgctgggtgccagcgttcatgtccatggcacatcataaaagcagttgctccgataacatctcctattatcccgtcacggataacctttattgccgtttgtatcccggctcctaaaaatgtatcaggagcacagcccagcaataaattatttttttctgcaagctccgcaagacagcttccctcctgcattgtaagtgaaagaggcttttctacataagcgtgcttgccagcttcaagaatgcttttgcacacttcaaaatgaactgcgggagttgtaaggttaaccactatcttaatatcatcgcaagagagcaactcatctaaagacatggcttttactccgtattccttagacgccgactccattttctccttgtcaagatcatgaacaccgacaagtttagtatttgtaaattttgacgaaagattttttaagtaaattccgcttatttttccacagccgataattcctataccaacttttttcattcttcaacactcctatctgacgcccaaataaggccgcgtctcataatttcctttgcctgctgtatttcaaataccttttcggtatgacccagcgatgtataaaagatccttcctttgccccacattttggtatacaccacaggcataaccgtttttccgtttgcgctgtgaggtccatcaaatactggaaactcagtcaccgcatatactttcaccgaaggatctacatgcatgtaatactgctcagatacaagagaaaaatcctcaagtccgcgagtaaaatatgactctttatcaagcttgacctcgtattctacaccgtcgttccccggatgtgctacccactgagcgcctgtcaagaactgccacgttgtgttgctgcgaaaagcgtcgcacataccgccgtgacagccgcagagacccacaccgctttcaacggcgtcacatatgtttttaactctctgtttgctgatctctcccattgtccaaaccgggattataacatttaatttcttaagctccgccgcatcatccaaaatatccatattatcagttctggtgacctcaaagtcctctgaaatcagcatatctgcaaacagctgtgaaacttctgacgggtgatgaccttcccagcctccataaaatattaaagcctttttcatatacatcttcctttcctaaatatttatactcaaattatatcacgcggatattgcgtccgaaatatcaaaatcgcttaaaaagtagacaaaattttacctttatgctataatcagttttaggagggattctatgttgttttatgaaaaccgagataataattttagaattgagaaatcatattcactttcatttgcgccgcatattcacaagcaaatagagatattttgctgtactaaaggaagcattgaggtaacctgtaattttcagaaaagactgctgactgaaaacatgtggatgattgttttgccggagtgcgagcattcctataactcaacggaatataccgagggaattattttgatattcaaacccatgcttattcccaggctttcctcgtgtttctcaaaaactattaatacgccatttgtttttctaaaggacagttttatagatacatgcgttaaaaggctttttaatgaatcagcaaaaaatgatgaaatttaccgcgacgctggaatcaagggtttgctatatttgattacctctgcccttttttcatgctgctcctttaccgaaaaaatttctcggcctgaagaagacaccatatacaagatcttaaattatgtgtctgaaaattaccggtcgccaataacactctctgacgcagcttcattcacagggcttaactacagctatttgtcaagaatattcaaacaaaaaatcggatgcagctttaacaagtatatccatgagcttagagccgaatacgcctcatatcttctcctaaacacggacttaacaattatagacatatgctataaatgcggatttgaaacacaaagaacctttaatcggatatttcttgatatctaccgctgcagcccgtcagaatatagaaaaacaaaatagcaatccgtatagtaatgtttgttttataaaagcctgtttttcgtgtttttatttaacttaaagcgatttatagaaaataattttttcggatactgactatttttgcgttaattatgtaaatatggctgtagtaaagtccttgtctaaaaaaataacaaaaaaacaattgtaaaaggcttttgcagccgaaatacaattgtttttatagttgttatttttttgttttattgaatatggactatagttttttaaagttcatttattttctattcagtttctacccattcagtaaccagttcagtaaagaaatggccgtccaaatggtcaatttcatggcagaaagcacgggcgactaaatcctcgcctgtatactcatacacagctccgtttctatcggtagctctgatttttactattttgggccttgttactaagccgtatctgcccggatagcttaaacacccctcggcgtctgtctgttcgccttccgtatatataatttcaggattgataagctctaacacagtatcccctgtatcaacaacggcaactctttttagaacaccaacctgcggtgcggctaaaccgactccatttgcggcttttaaggtttccgtcatgtcgtctaaaagataaattattctgtcgtttatttcttttacctcacggcattttttggtaagtatttcatcacctagtttaactatgtttcttattgccatattattttcctccgttttaactcatattaattggattgatatcaataatcatagtagtgtttttgtttttttgaatatgggtattattgatttcatggagaatatccagagataaatcagcgtccctgaccttaattaatattctgtatctgtaatcccctttaattctctgaataggtgcaggcataggatgagccagtttaattatattattgtggctgtcatcggaatttttaacaaattcaaaaacagaactgatttcagattttacaatatcttctgtttttccctgaaccaatatacttattatgtcacaaaacggcggataattcaagcgttttctaaattttatttcattttcataaaaaccaatatagtcatgagttttagcaaactcaattgtagaattctttggttggtatgtctgcacgactgcccggccaggaatatcccccctgccggcacgcccgcaaacttgtgtgagaagtgaaaaagtcctttcatttgctctgaagtcatcaactccaagagaggagtctgcggcaagtactccaacaagggtgacgtcagaaaaatctaatccttttgttaccatctgtgtgccaagcaaaatatctgcttctccatttttaaatttatttaatatcgcttcatgacttcctttagttgaagtggtgtcacggtccattcttaaaatttttgcctccgggaaaagccgcttcagttcgtcttcaattttttgggttccagtgccaaaaaatttaatatgctttgagccgcattcaggacatacggaaacattcctgatagaatatccgcagtagtgacaaactaaactgtcgttgttcatatgataggtaagaggaatactgcagtttttgcattccattacatatccgcactgtctgcatgaaacaaaggtgttataaccgcgtctgttcagaaaaagtatagtcttttcatttttttcaagatttttacgaatttcaaactccagtctattgcttatcggagacatattatggtaattaaatatttcacttctcatatcaacaatttcaacagacggcagggagttgtcattatatctgttattcatttcaaacagcttgtaatctccaagtgtttttgcatgataaaaactatcgacagaaggggtagcggaagccaaaatcaaaggagctccgtttgccgaagctctgtattcagcaacctcccgtgcatggtatctcggattgatttcagatttatagctgttttcatgttcctcatcaagaattatcattccgatattttcaagaggagcaaatattgcgcttctagcgccgacaacaacgtctacttcattattttttattttgttccattggtcaaatctttctccatacgataatccactgtgtattacagcgactcgtttcccgaaacggctgacgaatctttcaaccatttgaggagtcaaagagatttcaggcacaagcattattgctctttttccatcttcaatacattttcgtattgtttgaagaaaaatttctgttttgccgcttccggtgacgcctctgataagtatcttttcgtgtttgttctcgtccagaagattatctatataatctattataggtttttgttcatcagtgggttcgtattcatttgttacaatataatcagactcgtcatatacttcacgtaccttcttctcactgtatatttcaacaaaccctttttcggttaatgcggcgagagagctgtagttcccgtcagacaatgctattaactccgaagtcgtcagtttttcactgtctgctaaagctaaaagcatattgccttgaacatgagcatgtttcttaaaaagctcatcagcggccgcataagcttcatcagacgatattttaagcttgactattcttattgtaagctctctgattgaatcacttattttttcagatatagatataacttttttgtctgccaaagaattaagagaacggtgataagcgggggaagaaacaagttcaccaaggtggtcatattccataatcccgtcattttgagttagtatatcaactattttcttttgaaattctgaaataccggctgtatcagcgttttggagacttacccacctgcgtatcacagttttcattttcggcggcactataagcttaaatgcgctgtaaaacggacacaaatacctattttgcatccacacgcagagactaagaagttccttagagcaaaccggcttagtatcaactactgattttattctttttagcctggtaaattggctgctttgcgagataccgacgataagtccttcaacggaattattatatagaccaaacggcaccaggacgcggataccgacttttacagcgtcttctaattcttttggaacaatatagtcaaaagaacggtcgattatatgtttagggcttattaatgcaacctgtactatcatatgccttaccaccaaattattctataatatttatttgcttttattaattgataaagctttgtcaagaattatatttgacagctcaaatttatccattagaggaagttcgcttatatttccatctctatcaattaacgccgccacattagtgtcagtaccaaacccggcgcctgtagtttttaaattatttgcaactatgaagtcaacgtttttgtttacgcatttttctgaagcatttttgattaagtcctcggtttccatagcaaatccgacaatcgtttttttatcaccgaatttttcgccaagtttctttaaaatatccggatttttggataaagctatactcatatcatttagattttttttctttatcttattttctgatacggcagacggtttaaagtctgccacagctgcggccattattattatatctgcactttctgactcgttgattatactattcctcatttcatcggcagaggaaacgtcaatagttttgattccggtgataggttcacatgaattatgtccggcaaccagtgtaacttgtccgcctcttagcattgcagctctggcaagagcaaagcccatttttccggtcgagtgatttgttataaatcttacagggtcaattttttcctgagttgcgccggcgctgataacaatctttttgccggttaggtctgcggaatctaaaagcgctaattttgcgatgttttcaaatataacgtcaattccggctaattttccgtttccagtatcgccgcatgccaggcgcccgctttcgggcataacaaaatgatagcaatgatacttttcactcaatttttttatattgtcctgcacaattggattttcaaacatatttgtattcatggcaggagctatgagcacaggagcttttgttgccataaccgtagtcgtcagcatatcatcagcgatacctccggcgatttttccgatgatgtttgcagtacacggaactatagcaaaaacatcggcggcttttgccagggatatgtgtcttatttcccatgattttggctcgtcaaacgtatcaattgccactggattgcctgaaagagactgaaagctcagcggagctacaaattctacagcggattttgtcattataactttaacttgggcgccggactttacaagctttgaagtaagctcaagggctttatatgccgcaattccaccggtaacacccaatacaacagttttgttatcaagaagcataaatatcacctacataaaataatttataaaaatcaagcccactcggactgccagtgctggttcagccggtgggcggttattcaaataacgtcagtttaaagacttccgatatccggcgttgggatatagttgagcttatcctcataaatttcttcagccgctatagatacctctttgtttgacggaatatcaaccataggctgttttccctctgtcagctgtcttgcgcgtttagcggtttcaatagtcagcaagtatctgctgccggttttttcaaccatttcagtaataggcggttttatcatcataattaatctctccttttatttaatatacttaatatttcatctgatgcgtcttctacaattttatttactacaacataatcatatttatctttttttgtaagctcccattttgcagcatttatccggtcttcaatttcctcaggagtttctgtattcctaccgatcagccgttcgcgaagtacatctatattttcgggagcaataaaaatatatacggctgacggatatttctcttgaagattcaatgcgccctgaacatcaatttccaaaagcacatcttttccttcatctaatttttcattaacatatttaacaggagtgccgtagtagttatcgttatagactgcccactccatgaattcgttattatcaatcatcttcttaaattcatcaacagatttaaaaaagtaagtttttccctcaatatcaccgtttcttggagctcttgtggtagcagatattgacggaacaatgtctgaattatcagctaacagtttttttagcactgttcctttaccaacaccggatgggcctgaaacaacgattaaaagacctcttttattcatcgtcatcaccgccgtcttcaatgttttcatcaccggatttcggttctgcccttccggcgatagtttctgtttgtatagccgataggataatgtggtcgctgtcagtaacaataactgacctagtgcgtcttccgcaggttgcgtcaattaccataccgcgttcttttgcttcctgaataattctttttatcggcgcggaatcagggcttacaattgctataacccttgagcctgatacaatgtttccaaatccaacatttataagtttcatattagcctcgcttttattcaatattttgtatctgttctcttatcttttcaattaatgatttcatttctacaacaatttttgataagtctatatcattgcattttgaaccaatagtgttggtttctctgttcatttcctgaactataaagtcaagtttctttcctattggttctgatgaattaagagcgtttttaaattctttgatatggcttttaagtctgacagtttcttcatcaacggcaactttatcagaaaaaattgcgacctcggttaaaattctgctgtcatctgctccgctttccagctcagataatgcgtcgcgcagtcttttttcaagtctttctttatatttagttatagtttcaggagaaagtttttcaactttttcaacttctgacgacagaatatttaaatgttctaaaatgctgttgttgagcctgcttccctcgttaatacgcatattcaagaaatcttcaagagcagcgtccagcgcggtatttatcatatttaaaattgcttcttcatcaatttctttatattgaacttcaaatatatcagaaagcgagcacatggatgacattgaaatatcatctttaacaccaaagccggataattcacgcaaattatttatgtatgattctgctagaggaagatttattttaacctctttactgtcatcattgattttatttatggaaacatagacttctattttacctcttgaaatattctgagataattttgcacgtatgttttcttcaagaaaactataaattctcggagtttttatagtataatcagcatatctgtggttgacggacttaatttggattttaacttcatataaatcgtcaaatgtcatttcggctcttccaaaaccggtcatactttttatcataattctacctcataacaaattatttttacagcttgatttattaacaagaatatagtataatctataaatagaaattatcttgtatattacagtgtaaattatcattattttgcttatctatcttttaattataccatattttttattgattgccaatagttaagaagtgttgtaacaaaaatgtaatattaaaataatatatatgtaattatagtgtaattaaattgttagtatattattcggattaaattggcaattcacgggaaaataaagtattgttaacaatttgttaacaattttagcaaacgcctgatatgacgttgttatagatgtattaatattcaataaattgggcagtttcttcaattatagcccctaattctattgacagattttcggaaaagcggtataatcgtcacatagtttcaaaagttaaacgcagaaatttggccgtataaatgttatttggccggtcttatttttgttgctttttgaaactgatagtcaaaatttatgcagaaaggggttgtggtttagaatagcgcatagacgtatattcgaaatttttggaggttttttgttttgagttttggaaagagttttagaagaattgttgcaacactattagtattgatgacaatttctacttttataatactacctacatatgccgattacgatgagatcgatgaaccggctcaatactatggtgttgttcaagtctcaacacttaatgttagacaaagcgcatcaatggacgccggtgtaatcaccacgcttccgtatggtacaagagttagagttaattggattgaacccggctgggtttgcgttgcatataataatgatggacttattggttatgtttcagctgactatctttctgtttacgacggaacgatacctgaagcaagtgaaggcggtcaggctgtttgcgatatagcggcacagttccttggggttccatatgtatggggcggcacttcacctaacggatttgactgcagcggattggttcagtatgtatatgcacagttaggatttaaattggctcgtgtagctgacgaccaaatgaaagagggtattcctgtttcaagagatcagttaatgcccggtgatataattggattcagcagttcaggtcttggcggatatgcttctcatatcggaatatatgttggtgacggaatgatgattcacgcgccgcatacaggcgatgttgttaaatataccagtattaattctgattattatgcttcgcgtttcgctggtgcaagaagaattatttattaagtttaatattaagacgagggcgacctaataggccgtcctttttgttcatgaattatattaatataatataagtttatttaggagagtataacatgacgattgaggagttaaacagagcgattaagtcttatactataccgcgggtatttttcttttttggtgaggagacatatttgctggaaaataaaataaaatctataaaggataaaattgtccctaaagatttagtaagttttaatttttcatatttaaactcggataagataacaccggatgaaataattgaagctgctgaaatttttcctcaggtttcggacaggcgtcttgttgttgtgaaaaacagcggtttgttttctaatctgacgacaggtaattttaaaagtattaaagaatatatattaaatcttccggaatatgtatgcttgatattttgggaggatgggtttgattctaaaaaagttaaatcactgaagtttattgaagaatgcggcggcgggatagtaaattttgaatacttaccggtaaacaaacttgaagtttgggctgagaaacagcttgaaaaagcaaacaaaaggataattgcccgggatttaagttattttgtaagaatatcaggtcagtctttgataaagttaagccaggatataaaaaaattgattttgtatttgggtgatgagcgtcataaggtaacaagggatgatatagacgcagtagtcacgaaatctgcagaggttcaggtttatgatatatttaataaaaacattataggcggacgcggagataaagccaaggagcaattgaaacatttaaaaactgataatgtttcacctactatggtaatgagtattattttagaccagttatatgaactgctgatgtgtaagctgttaaaacaggatggtctgacagcaggagaaatgcttgaatactttgacaggcgccctccaatttttgcagtaaataaagctattgataatggtatgagatatagtgaaagttatttgaaaaaaatggtcgataaaggtttgaaatattcaattgatatgaagtcaggcaggatgggacaatgggatgctgtcgagctttttgtatctgaattaataaaaaaagattaaagtctatgtatttaataatataaatatattggcagcgggtgaatataatggaaaatggcgttataatgcagtattttgaatggtatcttccgcctgacggaaaccattggaatagattaaagaatgatgcaaaacatctgtctgacataggaataactgccgtgtggcttcctccggcttataagggagctaacggaatatttgatgttggatacagtgtttacgatatgtatgatttaggggagtttgaccaaaaggggtcggtttccactaagtatgggactaataaggaatatattgaagctgtagatgagcttcataaatatggtattgatgtttatgcggatatagttttcaatcaaagaataggtgctgacggaacagagattgtccgggctattgaggataacccgcaaaacagagaacagcagacttcaggtattgaagaaattgaagcatggacgagattcgattttttaggaagaaataatacatattcggattttaaattggattggaagtgttttcacggcgtagattatgatgagagaacaaaaagaagttctatatttttgtttgagggtaaacactgggacgaaaatgttgacagggaattgggtaactatgattatttgatgggggctgacaccgattttgattatcagccgcttaaacaaagtttatttgattggattgattggtatgtcgatacagcaaatattgacggttttagaattgacgcagtaaaacatataaaatttgaattttttaaagagtggctgtcttatataagaaacagtaagaaaagagaattttttgcagttggtgaatattggagtaaggatttagccaggcttcaaaactatctcggaatttgtgagaatgctatgtctctgtttgatgttccgcttcattttaaattttttgaggcttcagccagtgacggaaatatggatatgtcaaagcttttagatggaactttagtgtcgtctgagccgacaaaagctgtaacttttgtagaaaatcatgatacccaggagggtcaggcgctccagtctgcggttttaagctggtttaaaccttcagcatatgctgtcacattgctgcgtaatgaaggttatccatgtatattttatggagattactatggtgttccatctcataatgaaaaaccatttatggatattttggataagcttttatggttaagaaaagaaaaagcttttggttttcaaaacgactattttgacgactttgatgtggttggatggacaagggaaggcgacgacgaacatataggatccggacttgcggttttgattactgataagcggggcggtgttaagaaaatgtatataggaaaaagacatgcgggaaagattttttatgattgtataggaaattgtgctgatactgtaacaattgataaagacggttatggtgtttttgaagtttctgacggttccgtttcgatttggatattaaaaaatgaataatatactaaaaaatctttgttaattttgttcataatatttgacaaaactcttataatgtgttattctaagtagcggtataagcggatacggtttaaaccgtttaattggaggtgagggtttggcggacgaactaaagctgattaaaaaagcgcaaaaaggtgacgttgaagcttttgagaagattattactgagtatcagtctattatatataatatagcttttagatttgccggaaatgctgaggatgcggccgatatgtcgcaggaagtttttctgaaaatgtttagaaatataaactcgtttcaatttaagtcaaagctctcaacctggatttatagagttgcaacaaacacttgcctggatcaagtgaagagaaaaaatcggaataatcctgcttattcattagatgacgggtttgaggacggcgacggaagctttttctcaaatgaaattgcagacgattctcccacacctgatgaagttattgaacaggctgaaatgaaagacgttataaaccaggcaatatcagaattgcctgatgattatagaactgtcattatattaagagatatacaagggctttcctatgatgagattgcagagataattgaatgttctgttggtaccgttaaatcaaggattagcagaggaagaagaaatttaagagaaattttatctaaagacagggaactttttgataagtatttcgtctaacaaaatgtagacggatatatgtctgaatatacaatatattggattttattaattgaatatttctgtgtatatttttgtatattcgttcaattttactataatgtatataggaaggaggggtataatgtcagattacgaaaaggatgatgagcttcgtcgtaagtacggtgaggttatggacagtattgcggacgatattcgtcagataaatgtaaacaaatctgaaaagattgttcttgacgaaaaagctgatgatatttccgaaaataccggagatattttaagcggatttgaatctgccggcggaagcgatgctatcgaaaacagcgatgtgaaacatgattattctgacaataaatttttggagagtataagcagaatcgattttgacaatccagacgaagtattgaggagtattgattctggaaatgatgaatttaaaaatttatcagactttaacgaaccggattttgatgccccgcattacagtgtccctaatcttgataataatgtgtcaggagttttggagtctaatgatgaatttgatattcctgaggattatcctgatactttgagttgtgatgaatgtgtggatttattgtatgactatttgtctaactcaactgatgatgttgaaaacatgtctataaaagctcaccttagaaattgtgagatgtgcagggttgagcttgatgatataagagatatgattggcgttatgagcagttcgccgaggttgactcctccggctgacttgatatcaagtattcatagtgaactggcatctgcggctccggaagtcaagtacgaatatgaagttattaaagcaagcggagttttaggcgccggtccgattgataaattaactgcggcatttgaaacagcgcggtataaagttgaccattttataagacatgcaaattggaggattcttgctccggcggcacttagtgctgttttggttgtaggcgtggcttcaagcggcttgtatcaagtaatgaagtcttctgatgaagtatatgatttttctgataatgtcgctatagagagtgcaaaagctactgctaaacccagcgccagcgggcttgacgagtatattggaggaagagcatcagaatcttcgccaagaaccacatcggctcccagagcgtcttctgttcccggaaattcaacttcaccgagaactacagctagaccatcagccggaagttcttcagggctgaacattggttcaagtactccgagcagcagttcttctaataaatctacatcgtctagcacatctggcagcggaagtacaaataaaaatacgacaaaaagtaattctaacagcggtagttcaaataagtcaaatacttccagctctacaaataaaaacaacacaagcagctcaagcaataaaaataatacggctgcggcaactccggctcctaaagcttatgttactccgaagataattttgccggatattacgtcagctatgacacaaggaacacgctcaggacaggataataatttagttatacctgaaaatccggcgcctgaaaagtttgaatatactcccagtgacgattcaggaagtcaggaggaagcaaatcagcctcagactcagaatgagtccaacgatacaaatattccgaatactccagccgctgtaacatcaggcggaggaggcggcggaagcgcagcggaatcaacagtaactccggagcctactgagaatccaaaacctacgcctgaggctactcccggtgcgtcggctccagtagcaacaccttctattactgcagaaccaaaactgggcagaaatagtaagggagaaactaaagcatttgcagataaatcagaaaatatggacgatgcctctgtagtgagctgtgagattaaagataaagcggtatatgacgttcttatgagttcagcgcttgctaactgttcaaagattgatgagaacggcgaggtaacattatactttaccggctctgaatatattgcatttactgatttcttaaaagctaacggtttagaatatactttagttgttcttggtaataatgatgatgtaaaagtgcttgtcacaggagtaaacgtgacagaataatatggtttataaaggaatggtcatttgtaccattccttttttattggatttttttgttaatatataatttacaaaaagtttttgtctgttaaatagatttttatatttttattgggtataattataataataaaatatattaaaattttggaggcggataaagtgggaaatattatatcttacgtaaaagaaaatggttttctaacttttgatgctatggactttaatgaggttgacagccttgttttgtcacagctttcatatctttgctttgatagctttatagaaagtattcctaaatttgatataacatttaagggtttagcggaaaaagaaaataggaaagagttatttaaaaatattcgtactccgaaacaaaatcatagactgcttgacgcagttgcggagagtgagcggtttggaaacattggtattggaatttatgtcaatgaaatagaaaaagaaatagaaaaacaattttccgctgtaactttcaaattatcatcggagaaatattatatagcatttcgcggcacggataaaagcctgattggctggaaagaggattttaatatgtcttatcttaaaaacgttccggctcaggattccgctctctgttattttaaatctgctgctgaagagcttgacggcgtgttcatattgggcgggcattctaaaggaggaaatttgtccgtctatgcggcggctaatgctgatgaagacgaatttttgagaatagaaaaaatatataatcatgatgggccgggattcagagataatactttaagccaagaaaaaaggtctaaactttcggatatagttttgaaaacggtacctaaagcgtctgttgttggactcatgcttgaaagtgattcaaaatataaagtagtattcagcaagtccttagcctgcaatcagcataatccgtttacatggtcggttaaagctgacagttttgtattcataaaagaaacggatatgttttcgagattttctaaaactgctgttgataaatggcttgagaataatgatgatgaaactgtgagcggtctgattaattatgtatatgatttgattaaggcgacaggaagtgatactgtggctcagttaataaaaaattggaataaaaatatgagacttatttataatgaaataaaaatttcggatccggagcttaaaaagttagtagtcaaggctctgcatgattttatagtaatttttaaggatattttaaaagggaaaagaaaatatagtgatgcgaaaacttgttctgaagtcagtatatcaagcaaataaattcaggggcgtttaattcatatttgaattagacgcttcgtttttatattaactattataatatgcttctggttcgcagttaatgaataaaatttatgtattaaaagttagtttatttgggtgcatacgactttatttattgtttattataaaatatcttattattgtttttctaaaacatactttttatattaatttacacaagtattcaatttgtattctgttatgtttataacacaatttgttattattacttatttttgattgaaattttagttaaaaatgtcagcgtataatatatctattttaatgctgcaaaaataattcaagaaaaactgcgtataagattgacaaaagataaatttatgtttaaaatactatatgtatgtaaaattataaaatattatgacaattctgctgaaaaggagcttttgtatgagtataaagagactgtttgtagaaaagaaaaaaggtttcgatatagaggccgaagagcttaaatctgaccttgttgaaaatttaggtctgagcggccttaccggtgttcgtgttataaaccgttatgatattgacggtatcagcgatgaagaacttcaaaaggtgcttcccagtgtttatgcggaaccgcaggtagacaatgttgaatttgaaaatatagaaataccaagcggtgataaatattttgtttcagaatacctgccgggtcagttcgaccaaagagccgacagtgcggcacaatgtactcagataatgacagaaggtgaaaaaccggttgtcagaaccgctagaattgtcattttgtcaggtgatattagtgatgatgagttaaaggccgttcaggaatattgtatcaaccctgttgagtcgcgtttggcgtctatggaaaagccggataccttagccgacaaccttgaagagccggctgacgttatgattgttgacggttttatagatatgaatgataaagagcttgatcagatgattgcagatttgggtctagcaatggactatgatgatataaaattctgtcaggactattttaaaaatactgaaaaaagaaatccgagtttgacagagatacgtatgatagacacatattggtctgaccattgccgtcatacaacattttctacaaaacttaataatgttaaaattaaaaatgagtttattaagggtgtatataacgattacctggaatcaagaaagttcgtatatggtgaacgcaaaaagaatatctgtcttatggatgttgctactattgccgctaaagagttaaaaaaacgcggtatactaaccgctcttgatgagagtgaagaaataaacgcctgctcaattgaagttgaagtaaagatgactgacggtacctgtgaagactggctggttatgtttaagaatgagacgcataatcacccgactgaaattgagccgttcggcggcgctgcaacctgtctcggaggcgctatccgtgacccgctgtcaggccgttcatatgtctatcaggcaatgagggttacaggtgcgggcgacccgagaaaaacattaaaagaaacaatggagggtaagcttcctcagcgcaagctggttattggagctgctgagggctatagctcatatggaaaccaaataggtcttgctacaggcggagtaaccgaaatatatgacgagggatatgttgctaagcgtatggaaatcggcgctgtaattgctgccgctccaaagaaaaatgttatacgtgaagttcctgaacctggagatgtggtgattttacttggcggaatgacaggccgtgacggctgcggaggagctaccggctcgtcaaaagcccatgacagttcgtctttagagacctgcggcgctgaagtacagaagggtaatccgccggttgagagaaagctgcagagattattcagaaagaatgaagttaccacactgataagacggtgtaatgactttggtgccggaggcgtttcggttgccattggcgagttggctgacggacttaatataaaccttgataaggtgcctaaaaaatatgagggtcttgacggaacagagcttgctatttctgagtctcaggagcgtatggctgttgttgtaagagctaaagacgctgaaaagtttattgatgaagctgataaagaaaatcttgaagctgtagtagttgctgaggttactgaatcgccccgcctggttatgaactggcgcggtgatgttatatgtgatatttcaagggagttcttgaataccaacggcgctgaaaaaaatgctgatgttgagattgcggttgataatttctcgtccgatatgtttgaatttgaaacaaagggcaatgactataaagagaagattctaaatttaatgagtgacctgaacgtatgctcacaaaagggtcttgttgagagatttgacagcactattggaggaaactccgtgtttatgccgtatggaggcaagtatcagcttacgccgcagcagaatatggttgcaaagattccagtgctgggaaatgaaaccaatactgcaactgttatgtcttatggttataatccgaaaatatcaaaagcaaatccttttatgggcgctgtttatgcggttgtggattcggttactaaagccgtgtgtgccggtgcggattataaggatatttatttaacgttccaggagtattttgaaaaacttggaaacgatccaaagagatggggaaaacctcttgcggcgcttcttggcggttattatgcccaggagagtttgtctatggcggcaataggaggaaaggactcaatgtcgggttcttttaatgatattgacgttccgcctacactcgcgtcatttgcagttgcgccgcttgacgcttcaaaggctgtatccagtgaatttaaaaatgccggaaacttggtatttttggttaagcctaagtatgacgaaaataatctgcctgatttcgatagtttaaaacagctctatgatatgttatacatgatgatttcagacagtaaaattaatctgataaagagtgtttatgctgttggatacggcggtgttatggaagccgtttgtaagatggcgatgggaaataaactaggatttgaatttaccgagtgctgcgataagtctgaattgtttaaggctttatacggaagcgtaattattgaagttgacggattaaaggcaaacggttctttgggcagtatgcttgaaactgttaagctgggtcatacaacagacgacggcgtcataaagattgaaaatgaaagtataagtattgatgagattgtttcagcatggcagaaacctcttgagagcgtttatccaacaaagtcaaaatatgaggatgttggaatgaaaaagtttgactgttcagagagaaatatttctgtgccggctgtaaaggttgctagaccaaaagtgtttattccggcttttccgggaacgaattgtgagtatgattccgcccgtgcttttgaaagagcaggagcggaagctgatgttcagattttcagaaatctgaagcagtcacatgttgaagaatctatcgaaagatttgtgaaatctgtcaatgaagcgcagattataatgattcccggcggtttcagcggcggagacgagcctgatggttcaggcaagtttattaaagcggcttttgaaaatgagaagttaaaagaagcggttatggagcttttgaataatagagacggattgattcttggtatttgtaacggttttcaggcgcttataaagttagggcttgttccgtttggtgagataagaaagatagacgatacctgtcctacactgacatttaatactataggcaggcatgtatctcaaattgtgtcgactagaatttcgtctgtaaaatctccgtggctgtctggagttaatttgggcgagatacaccagattgcagtatcccatggtgagggcagatttgttgccagcccggaaataatcgcggaaatggaaaagaatggtcagattgctacacagtatgttgattttaacggtgaaccgacttatgagatgccgtataatccgaacggttcttattatgctatagaaggtattacaagtcctgacggaagagtgtttggtaaaatgggtcattctgagcgtatcggggaaaatgtttataaaaatataaccggtaatatagaccaaaaaatatttgaaagcggagttaaatattttaaagtataaggagaaaaccatgtcatattatgaagcgtccgaattccttaaaacaaagactaatataagacctaaaacggcggtagttctagggtcgggtttgtcagaactgattgatatggcagaagtagatacaatcataccatattctgaaatacccgggtttcctgagttaaataatacttatcataaatgccgggctgtttttggaaaactttcaggaaaagatatattgattatgcagggaagaatccactattatgagggattttcaatgcaggaattagtttttcctatacgaatgatgaagtatctcggtatagagacggttattttgactaatgccagcggagctataaatactgattttgttcctggtgatttagttatgattgaagaccatattaaactaggttttgattctcctcttcgcggcaaaaatcccgatgagtttggagaaagattttttgatatgtcaaacgcatatacatccggtcttaaagaattggctctaagcgctgctgagaaagaaaacattaatcttaaaacaggtgtttacggatatatgaccggacctcagtttgagactcctgctgaaattagaatgctgaggatagcgggcgctgatattgttggtatgtcaacggttcctgaggttatcgccgcttgtcattgcggtatcaaagtcctgggattatcgggagtatcaaatatggcggcgggaattgagaacggcgggttcaattcagaagtaattgaaaatgccgaaccggtgtttagtgataaagttaaaaggctgattgagagaattatttgtgatataaattaggagatgatgatatggacagaattgcaagtttcagcgttgaccatagaaaaataaaaccatgcgtatatatatctagaatagacggagatataacaacatatgatatgcgtatgagaaagccgaatactggagaccttttaagcaattcagcgctgcattcactggaacatatgttcgctactcttatcagaaattcggaaatcagcggcgacgttatatattttgggcctatgggctgccaaaccggattttatctgcttattagaaacgctgataatcagcaggtcattgatataataaaagaaactttaagaaatataattatatatgacggagagatgccgggcgccagtgagatagaatgcggtaactatagaaatttagatatgaatctggcgaaagttgaagctgagaaatatttagaagctattaaagatataggcgttgacgatttggtatatgaaacctgaggagaaattataatgggaaatattttgattaaaaatattactgctgtaacaatgtcagacagctcaggagtgattgagaacgcttatattgttataaacggaaatctgatagaatatataggaaaagaaaagccggagacagaagattttgattatgttatagacggagagaataaagttgttatgccggggcttgtaaacacacatactcatttagctatgactttgcttagaagctatgctgatgacatgaatttgcaagattggctgttcaacaagatttttccgtttgaagataagctcacggcagacgatattttaaagggcagtgaaataggcgttgatgaaatgctcgccggaggaaccacttgtttcaacgatatgtatatgtttcaggctgaaacgggcagagttgcgctgaaaaagggaatacgagcagttttgagcgactgcgtgaattttgacggctacgatagaaaagttaaactaatggaagcaatggctgaagagtttaagaatgaggatttaataagcttcactttttcacctcatgctatctatacatgtagttttgacgtgcttaaaaagtgttcggattatgcaaaatctaatgatatgagtattcatactcatttggcggagacccagacggagtttgacgactgtgttaaagagcacggtatgacgccaactgaatatatggaaacaacgggtatttttgacagccctactattgcggctcattgtgtgtgtatgacggataatgatttagaaatattaaaaaaacataatgtaagcgttgtgcataacccaataagcaatttaaagcttgcttcaggagtcgctcctataactaagatgattgatatggggataaatgtggctctggggactgacggagcgtccagcaataatagtttggatatgtttgaagaaatgaaagttgctgctattttgcataagggtatcaccctagacccaactgttatgaatgcctggacagttttgaagatggttacggtaaacggcgctaaggcgctggggtttgataatttgggagttttaaaacaaggatatttggctgatatgattatacttgattttaactctcctcatcttatgccgaataataatactgtttcaaatttagtttacgcagcaaaatcaagtgacgttgagtatactattgtaaatggaaaattagtatataaccgtcaaacaaatgacagataaatattttttataaatcaggaggaattaggtatggcacaagtagcaattgttatgggaagtaattcggatttgccggtagttcagggagcgattgaccagcttaaaagctttggggttgattttgaggctcatgttatttcagcccacagaacacctcagcgtgctgaggaatttgctaaatcagcaaaagaaaacggtgttaaggttataatcgcagctgccggaaaagcggcgcacttgggcggtgtaatcgctgcttatactactttgccggttatagcgcttccaataaagtcttcgtttatggacggacttgattcacttttatcaatggttcagatgccaacaggtattcctgtagcgactgtaggagtgaatggtgcggataatgcaggtatacttgcagttcaaatgctggctgtttcagattcagcgcttgcagagaagcttgacaagtttaaggcggatatggctaaagcggtagaggagaaggataaaaagcttcaagacgaacttttaaacaaagcataataaattattttacttaaagataaaaatctatttggaggatatgtgatgagcgaagcatataaaaatgcaggggtagatgttgaggcagggtataggtctgttgaacttatcaaagaacatgtaaagagaacaaatattccgggtgtattatccggtataggcggatttggcggtctgtttgagttgggcggcgaatataaaaatccggtattggtatcaggaaccgacggagttggaacaaaactgaaactggcttttattatggataaacatgacactgtaggtcaagattgtgtagctatgtgtgttaatgatattgtctgcggaggggcaaagcctttgtttttcctggattatattgcggtaggaaaaaatattcctgaaaaaatcgccgatattgtaaagggcgtttctgatggttgcattgccgcaggatgtgcgttggtaggtggtgaaaccgctgaaatgccgggattttatgacccgagtgaatatgatttggcagggttttctgttggtatagtcgataaagaaaaaattatcgatggagaaaatattaaaccgggcgatgtaataatcggtattcagtcttccggagttcacagcaacggctattctcttatcagaaaagtatttaatatagatgacagttctgaatgcgccgaggctttaaaagcttatgatgatgagttgggatgttctgtcggtgaagctctgctggctcctacaaaaatttatgttaagccaatgcttgcggctattgacgctgttgatgtcaaagcggtttcacatatcactggcggcggtttttatgagaatatacctagaatgttgaaagacggcactagagcaaaagtatataaggaaaagtttgaagtattgcctatattcaagaaaattcaggagatgggcggaatatcagagcatgatatgtacaatacttataatatgggtgttggtatgatgtttgttgtacctgaaagtcaggtcgaagaagctgttaatgctgttaatatagcaggcgaaaaagcttttgtaatcggagaaattactgaaggcgaaaagggtgtagatatatgctgagaataggtgttttggtttcaggcggcggcacaaatctacaggcgattatcgacgcaatatcaaacggtaaaataacaaatgcggaaattgttaccgtggttggttcgagacccggagtatacgcgcttgaaagagcaaaattaaacaatataccttctattgttatttcaagaaaagcatttaattcattggaggagcatgatactgcggtttgtgaacatatgaagtattgtgatgttgatttgattgtcatggcgggttatttgagcattgtcggtgacaagctcataaaagaatttgataataaaataataaatattcatccgtctcttatcccatcgttctgcggtccgggattttatggccttaaagttcacgaagccgcacttgaacgcggcgttaagataaccggtgctactgttcatatcgtaaatgaagtatgcgacggtggtccgatattgcttcaaaaagctgtagaggttaaacccggcgatactccggaagtgctgcagaagagagtaatggaagaagctgagtgggaaatattacctaaggctatagatttgattgcgaacggaaaaatataaattttggaggctaatctgattatgaaaattattgatttatcccaagaattaaaagaaaatacatatcccggcaggggaattattgtcggtaaatctcaggatggaaagagtgcggtttgcgcttactttataatgggcaggagcgctaacagccgtaatcgtatatttgttgaagatggaaacggaatccgtacaaaagcttttgacgaatcaaaactggaagacccgtcccttataatctatgcccctgtaagggtgctgggcaataagacaattgtcacaaacggcgaccagactgatacaatatatgaacttatgaataaacagatgacctttgaacaggcgcttagaacaagggagtttgaacctgattctccaaactatacccctaggatttcaagtgtaatgaaagtgagcgacggggattataactatgctatatccatattaaaaagtgcagacggcgacccttcttcatgtcagagatacagctttgcttattcaaatcctataaatggaatcggtcattttatccatacgtataaatgtgatggaaacccgcttccaagttttgagggagaacctaaaaaagtggaaatacctaattgcattgatgagttttcaaatatgatttgggagagccttaatgaagataacaaagtttctttatttgttagatatattgatataaaaagcggcaaaaccgagtcgaggataataaataaaaacgtataactgtatacgtgaaagattttagcaaactttgtattcaattttaggaggaagataaagtatgaaagaaatggaactaaagtatgggtgtaatcctaatcaaaagccttcgcgcgtatatatggaagacggcagtgagcttccgattacagttctgtgcggaaagccgggctatataaatcttttggatgctctaaacggatggcagcttgtaaaggaacttaaaaaggctacagggcttccggcggctacatcgtttaagcatgtgtcaccggcaggagccgcagttgggcttgagctttccgatacgcttaaaaagatttattttgttgatgatactattcagatgactcctttggctaatgcttatgcgagggcgagaggtgcggacagaatgtcttcgtttggagattttattgcgctttctgatatttgtgataaggctaccgctcaattgatcgcaaaagaagtgtcggacggtgtaatcgctcccggatatgatgacgacgctttggaaattttgaaaggcaagaaaaaaggaaattataatataactcaaatagataaagattatattccatgcccgatcgaaaagaaacaggtttatggagttacttttgagcaaggcagaaacgagcttgacattaataaggaacttttgtcaaacgttgtcacagagaataaaaatatttcagaatcacagcttcgtgatttgatgatttcacttattactttaaaatatacacaatctaacagcgtatgttatgttaaagacggacaggcaatcggtataggcgcaggtcagcagtctagagttcactgcacaaggcttgccggaaacaaagccgacgtatggtggctgagacaggctcctcaggttttaaatttagagtttgttgacggtctgaaaagggctgatagagataatgcgattgacgtttatatttctgacgagtatatggatgttttagctgacggcgtatgggaaacccgatttaaaacaaaacctccggtatttacaaaagaagaaaagatagaatggctgaaaaagaatacagacgtttcactcggaagcgatgcgtttttcccatttggagataatatagaaagagcgcataaatcaggtgttacggctattgcacagccgggcggttctatcagagatgacaatgttatagaaacctgtaataaatatggtatggctatggcgtttacaggtatacgcttgttccaccattaatattaataaataattagttgtttagaaattgttaaaagcatttgtacaatgtattgagtgttaaaggttgtacgaaaaatatttattatctttcgaaaaaattggagcattacttatattaatgttttgtttagaagtttgttgtatataattgtttttaacagtgtattaaaaaattttgtatttagtgatttacggcatagtcaaaagcggctatgccttttattttttataaattataattaaagagtgaggtataatgatttttgaaacagaacgtttaaaacttagagaactaaatataggcgattttaaagatttggctgaaatattacaggataaaaatgttgtatatgcgtatgagcatgacttttctgacagggatgtgcatgaatggatggagcgtcagtttaacagatatttaaagtatggttttggattgtgggcagttgagttaaagggaagcggtgagatgataggacaagccggtcttaccattcagccatataatgaatctgaggtgttggaaattggttacttattaaagaaaaagttttggcataaggggtatgcgatagaatcggcaatgggatgtaaagaatatgcttttgaagttttgaaagcggataaagtatattctattataaaatctgataactatccttcaatacgagttgctaagtctattgggatgagtaaagaaagtgaattttatactcagtattatggtacaaaaagtttacactatttattttctgtaagtaaaaaataaaatacatattatactgagtttatatagtaaaaatccgtctgaaattatttaaataatttggtgaaaaaagccttttaattggataagtgttatgttataatattgggcaagctattaaaatgaggtgtattatgctagatataaagaaagttcaaatgtatacagacggagcatgcagcggaaacccggggccgggcggttatggaacaattctgaggtatggggaatttgaaaaaaaattgtccggcggcgaggctcagaccactaataaccgtatggagcttatggctgttattgtcggtcttaaagctcttaatcaaaaatgctgtgttgatatatacagtgattccaaatattttattgacgcaattgataaaggctgggcaaaaaagtggaaaaggaacggatggatgcggaataaaaaagaaaaagctttaaacccggacctttgggaagaggttttaagccttatcgaaaagcatgacgtcactctgcattgggtcaaggggcacaacggacacccggaaaacgaggagtgcgaccgaatggcagttgaacaatctaaaaaatttagctgatacaattattttaaaagcaaataaattacggtaaatctacttttcatagattgagcgtataaaaagaaaggtaggaaagagtatgagaatttatgtggacaatgcggctactactaaaatgaatgccgcagttgcagaggaaatgattccgtttatgacggaattttacggaaacccatccagtatttatttggagggcagggaggcaaaaagggccgttgaaaagtcgagagaacaagttgcaaaggctatttcagcggaacctaaagaaatttacttcacaggaagcggtactgaagcagataattgggctgttcgcagctccgcgtcagcttattctaataaaggcaaacatattataactagcagcgtggaacatcatgcggttctccatacttgtcaggacttggagaaagaaggatatgaagttacctacctgccggttgatgaatatggcagagtttctgtggaggatttaagaaattcaattagacctgatacgatactggtttcaatcatgtttgccaataacgagattgggactataatgcctgtaaaagaaataggcgctgtgtgccgtgaaaacggggtattgtttcatactgacgcggttcaggcaataggaatgtgtgaaattgatgtagaagaattaaatatagatatgctttctttgacggcgcataagtttcatgggccaaagggagcaggggccttatatgtgaggcaaggagttaaactgacgccttttattaccggaggagcacaggaacgcggcaaacgcgctgcaactgaaaatgttcccggaattgtagggctgggcaaagcgatagagctggctgcagagaatattcctgagagacagaaaaaattatcggaactcagagattattatatagaaaaggttttgaataaaataccatattcaagacttaacggtcatccaaaggacagacttccgggaaatgcaaacatcagttttcagtttattgaaggtgaaggaatgctgcttcgtcttgacatgaaagggatatcggcgtcaagcggaagcgcttgcacttctggttctttagacccgtctcatgtgcttttggctatcgggttaaaacatgaagaagctcatggttcgctcagagtttcttttgatgaaacaaacacgaaagaacaggtagattatattgttgatgaattggctgatataatagaacttctcagaaatatgtcgcctttgtatgaagattttatcaaaaataattagtcaaaggaggaaaatatatgtatagtgaaaaagttatggatcatttttcaaatcccagaaatgtgggtgagatatctgacgccaatgctgttggacaagttggaaacccaaaatgcggggatataatgaaaatatatatgaaaataaatgatgacacaaaagtgatagaggatgtaaaatttaagacattcggatgcggagcggcaatagccacttcaagcatggccacagaacttgttaaaggtaaaactattgatgaagcattggagttaactaatcaggcggttgcagacgctttagacggtttgcctcctataaaaatgcactgttctaatcttgcagaggaagcagttcatgctgctcttgcagactattatgaaagacatggaatggatacgtctgaaataccgcagtgcacaggctgttgttcttcgtgcagtattgagcatgaaagcggagaggattaagctatgtcagaaaagattgtgataggaatgtcaggcggcgttgacagcagtgtagccgcggcgcttctaaaagagcagggatatgaggttataggcttaaccatgcgcctgtgggacggagaaacagtaggtggtgtctttaaagacggcacctgctgttctttgtcagcggtggaggacgccagacgagttgcatacaaattaggaatagaatatcatgttttagactttcgaaaagaatttgagaaatatgttattgactattttgttaacgaatatcaaaatgccaggacgccaaatccttgtatagcgtgcaataaatttttgaaatttgacgctatgctaaaaaaagccaaattgcttggcgctgagctgattgccacaggccactatgcaaaagtctcttttgattcttcatatggcagatatcttttgcgccgttcaatggcttctgaaaaggatcagacatacgctttatattctttaaatcaggaacagttaaagtctataagaatgccgctgggagaaattgacggtaaggcccgggttcgcgaaatagcagaaaggttggatttgccgactgcttcaaaaccagacagtcaggaaatttgttttgtgcctgataatgattatgtatcttttatagagcgcaggactgatagaaagcctgaacccggaaactttattgacgagtatggtaatgtgctcggcatacacagcggtataacccactatactataggtcagcgaaaaggacttggaatagcttttggaaagccaatgtttgtgacgaaaatcaatcctcttactaatgaaattacattgggcgaaaaaggcagtgagttttctgaaagtttgattgctgacaatttaaatttcatttcatttgaaagttttaatgagccttttgaagccttggctaaaatcagatacagtgctgttccgtcttcctgcatagtttatccttatgagaatgatatggcaagggttgtttttgataaaccgcagagagcggtaacgccgggtcaggctgttgtattttatgagaaagacagtgatatagtaattggcggcggtacaataaaagaggggtgattaaaatagattttcttagtttgagacgaagtataattgataaagagtataagaacctgaatgaaagacaaaaagaagctgtgtttacgactgagggtcctatattagtgcttgccggggcaggaagcggaaagaccactgttataatacataagattgctcatctgattaaatatggaaaagcatatatgagccagcatatcccggataatataactgagcaggaaattgaatttttggaatggtatttaaacggtgaactggacgagctcactcctgagatagagaattatctgtccgaggagccggttaagccttacaatattttggcaataacatttactaataaagctgctggtgaacttaaagcaaggttggaaaaaagccttggagcggttggaaatgacgtttttgcaagcacgtttcattctatgtgcgttaggtttttgagacgtgatattgacaagataggatacgaaaaggcgtttacaatatatgacagcgccgaccagcagacagttgttaaagagtgcttaaaagagcttgaaattgatgataaaaagtacccgccgagaaaagttttaagcttaatcagcggagctaaggataagctgatagacgctgatgaatatatggacggctgtcaaagcgactattatttaaaaaaggttgctgatatatacaagctgtatcagagaaagctcaagagcaacaacgctttggattttgatgatttgatagtgctgacagtaagactgtttgaagagtgtcctgaagtgcttcagtattatcagaataagtttaaatatattttggtggatgagtatcaggatactaaccatgctcagtatagactggtaagccttcttgcaaataaacataaaaatttgtgtgttgtgggagacgatgaccagagtatatataagttcagaggagccgatatacaaaatattttgggatttgagcaggagttttctaactgcaaagtgataaagcttgaggaaaattatcgttctacacagcatattttagacgccgcaaacagtgttatcaaacataacgatggcagaaaaggcaaagagctttggacttcaaacggcgaaggtgaaaaaatcagcttatacatagctgacaatgaacatagcgaggcgcagtctatagtagaaaatatattaaatttaaatgcaaatttgaatgatacggttatattatacagacttaatgcgcagtcccgtattatagaggatacactattgagaaatgcaatcccctataaggtacttggcggtttgagattctatgatcgtaaggaaattaaagacataagctcatatttgaggctgattgtaaataccaatgatgatattgctttaagaagggtaattaatgagccgaaaagaggaattggaaataccactttggaaagagtatattcgatatcggtgcggaactccttaagtatgtttgaagtttgtgagagagccgatgagtttgacgaatttaattcttcagcgtctgccaaacttaaaaagttttcagaacttataaataattttaagcgtgaactggatgaaggtatggggcttgagctttttgttaaacttgttatgaaaggttcgggtatgattgaggcgttaagcactgaaaagacagttgaaaatcaaaccagacttgaaaacttggacgaatttatttcaatggttcaggaagcggtccgtgaagatgaggcaataactttagaccagcttttagaaaatatctcactggtttcggatatagataactatgatgaggcacaggaatgtgtgacgctgatgacacttcacagtgcgaagggactggagtttccaaatgtgtttttaataggtatggaggaaagtgtttttccgagcgcaaggtcgtttggagttcaggaggaattagaggaagaacggcgtctatgctacgttgggataactagagcaaaaaagaggctgttcctatcggcggcaagacaaagaactttatttggacaaacaaagtataatatgccgtcgagattccttgaagaaatccctgaagagcttgttgataagaaaatggatactccgtcatattctgcaggcagtacagagtcttcgtacaaatatgccggtgagaataaaaatacatacggcggttttggagacagcggtttcttaaagaaggcgccggagaataccttgcaggatgaaacctcatatattattggtgataaggttaaacacagaaaatttggtattggcacagttgtatcagctcagcaaatgggaaaagactgtttggtagtcgtagattttgaaagcgtcggtcagaagaagatgatggccgcatatgcaaactttgagagagtggaatagtatatgtacaatgatttttcgctgatttatgataggttccaggagatagattatagggaatttataaacttttataaagaggtatttaaccaaaataattatgagccgcattcaattatcgatctaggatgcggctcaggggaaataacagttttgctcagcaaggaaggttatgagataacaggaattgacatatcaagcgatatgctttctatagctcaaaataaggcctttgacaacggcgtagatataacgtttttaaatcaggatatgactgaatttagtgttttagataaagcggacgcagttatatcctcgcttgattgtattaattatttgccgtgtatgaatgatgtaaaagaaacttttagccgtgtttatgagagcctcaaaccaaatggaatatttatttttgacatcaactcagaatataaattaagcaatattttaggcaataatacttttgtataccaagatgatgaagcatattgtgtttgggaatgcggttattttcctgaagacaaagttacgagttttgagctgaacttttttgtgaaagacaattcaggaaaatacgacagatactttgaatatcaggaagaaaaattgtattctgtacgagagcttcaaagtatagcagaagaggcaggattcaaaaaaacagatgttttttctgacttgagttttgaagaacctaaacaagacagtgaaagaatcttttttgttttgcggaaatagatagtggctataataaatttagatatgtggtaacttttataatataaaagttcagactgttgataaagtatgaaagtgtttgataacattggacaatgctttaaatccactcgttcgaagagtaaacagtcatctttacgtttcaagtagagcatatagtgttttataatcacattctttacttcagttatttttcaggcagctgactcatatgagttagctgcctttgtttgtgtacttttcttaaaatcactttttccatatgctgacgttctaaactatattaatttgaaatgtgtaagggaatattagagcattaggattttttcttatcttctaggttggataatcttagttttatatattagaatttaaaatatagtttttataatatgacgctctgttgtcatatttaatatgataatatatagaaaaaggatggtgtttatagtggcttttgattttaaaaaagaatataaagaattttatatgccgaaagataagcctgaaattgtgacagttccgtctgctaattatatagctgtccgcggaaagggcaatcccaacgatgaaggaggagaatataagaaggctgttggtattctgtacgctgtggcttatacaataaagatgagttataagggaacttataaaatcgacggtttttttgaatatgttgtacctccgcttgaaggtttttggtggcaggaaaatgttgaaggcgttgattattcggataagagcagttttaattggattagtgtaatcagattgccggattttgtaaagaaggaggattttgattgggctgttcaggaggcgtcgcgaaaaaagaagcttgactgctcgccagcagaatatttaactataaatgagggcttatgcgtccaaattatgcacattggcgaatatgacaatgaacctgcttccgttgctgtaatggatgaatatatttctgcgaaaggttatgaaaataatttcaatgacagccgtcttcaccatgaaatatatctttctgacccaaggaaaaccgagccggcaagatggaaaacagtgattagacatccaataaagattaaatgaatttaagatactgaaataagatatttagtttataaacaagtaatgtggtttatgcaaaagacagtaacaggttaatttaagatatttcatatttgattgataagtttttaatattagcgtgttttgataacaaatttaatactactgaaaaaagcatatattcgctttagaatatatgctttttctgaaataatgtaagaaaaataaattgaatttatctgaatttataacctttaatttacttatataccgtcggttttaaggttccacaccatataattaattcttaaatatttttaaatatgtataatctgttatataggttatgcagagactgttaatccacttctttattagcggttttaatgttcttaatcgcatacataagtcttacatattgagttatttgaataactttactgtataggaaatgctgaattggatactatttatgtgtcttgaatcattcgttttatcttttacgtctactgttatatttttgtgtaatacctcagtgtatattctttattttccacgactttaatatatcaatgtcagatacgattattagattctttaacttttacaattgtttgtatgtaatatttgctgagataattctgtaatttattttccataattatttattgaaattatttctttacaaataatttcaatagtattttttatctaaatattcttgtacctaaaagatttaataggaattataatgctgtccctttcttaggcacaaaaaagtttgatatatctgctttttcaagagtaagcagttttatcttcttatcaataccgcctgcatatcccgtcaggcttccgtttgagccaactactctgtgacatggcacaataatagaaatcggattatgacctactgctccgccgactgcttgggcagacattttagtcagacctttttgtttggctattatatcagagatttctccataagtcatagtgtgtccgtaaggaatagtttttaaaatttcccaaaccatttttcgaaatggcgttgttttaaataataacggaggtgtaaaatccggttttttgccttgaaaataattatcaagccatccctttgtttcattaaaaactgataattctctttcttcatatttttcaggtaaagtatctccgaaatatttttgtccataaaaccataacccggttaaggcttcaccgttgctcgccagcataattccgcccaacggcgactgatatttaaaagtatatgtcattttattaaacctccgataaaatattaaatcagcaggtacttgattatttgcaaatatatatgtatcaagtattaaataaattttgatatggtacttgattttataaaaatattttgtacccaacaaaacttaatttaaacgtgttcagcatattatattatgtaagagttatttatatataattatgtatacagtgttagtgttaggaaattcgctcatactaaaaacactccttttataattttaaataaactcaacctctatgcgccccatgccaaatgtggtgtttccgccaatatgtaatatttgtgcggcatacagccagggaacaaataaagataaatctccatgaaaagacatacttcccattaatcctccaaaatccattttttcatttgttctgtttgaatatcgctccatattaaccaattctatatctttttttgttgtgataatctttgacgacaatttctgaatatgctccatcttttctgtatcaacccatccgccgtaacgtccggtaagagatttaattctatatgttatatttctaataatcgatgaaaaatcaacgtctgtaagcaattcattgtttcgccgcattcgcagaggcgttagaaatttaattgtcacactttctacattatccaatgttttatagactaaaggtatttttcgcattgccgcttgataaaatgttctattctgccaaatgactctttggtctgttttatgaacagccttatcaaatatgaatttattcctgcgtactccaagacgcagcccgccttgactgctcaatgcatcaataacatttttagcatatttggcgccgtcacctaaaaacattatatcaaaattaagaatatcatttttatagaataattttttaccaatcatcggtggaacaataatataaggatttaaaacttcttttcttttcttatctagacgtcggttatcatataaataatgacaagcttcagtgtcgtttctaagaacatgtccaattgcaccgcgaagcgtggagccgaggtatgccggcaatgttgatttatcttgagctataattgagaagttgataggtaaatattctaaataaaattctgaattttcgatcataacacattgcttacctttcctttgtagaaaatagacaaaaaatattttattttgtgttattttatcatatatttaaaaataatacaagtgtaaataatatattttcaaaaaaattaatatatctatacataaaaataataaataaaataataactgataaaaatattttattatttatgtattaaactttgattaataggaaaaatataagagaaatttaattatgtatgaatacaatataggtatctgtaacttttttattaaatagttaaggctataaagtgtataaattttttaattatagagttaagtttaaagctctttatagcaatcaactgaataaaaattaaatatatacattttttaaatttaaaattaaaaaatatgtcgaaaaagataacataaaaaatttaaaaaattttaaaaaaagtattgacaatggataaaaaaaatagtatactattatccgttgagtttgatatattcctctatagctcagctggtagagcatgcggctgttaaccgcagggtcgttggttcgagtccaactggaggagccacgtgaacagaacatgtaattcgaactattggtgtccgattacatgttctgtttttttacccaagacttatttatgtggttttggggtatttttatatacgaacttaatgttgtacacttttttcaaaaaatgctgattttgaatatgaaacggatagttttatacatttaaaccagtgatgtccggatagattcttgtgaaatccttaatttatcgtaaaacttggcctcaaacttattcggtgtccagtatcgcagaacagagtaaagccgtttttcgttatagaagatcatataattgttgatgttccgttttatatcttcaacagttttatattcgtgtcgatagagctcctcttgttttaaactgctgaaaaatgattcgcatacagaattatcatatggtctgcctggcttagaaaatgattgttcaagattcaatttttctgattgattcataaaggttttagatgtgaggttactgtcttgatctgaatgaaagagcagattgacggtgatttctcttgaactgtaagcttgcataaaagtcttccttatgatctgtgtactgttcttttttgaaattttccaagagacggctctgagagctaacaggtcaataattacatatatgtagtatttcatttgattataagtgtaaaaagttacattgctaacctagatctcgtttggacaagtggcagtgaattgctgatgtaagatattttgttttcgcctttggttgagctcatataattcctttgtaccgccgcgaatactaaactaaccattttcgtgcattatttttgctattgtatttgaggaaacatgataacctaggtcatgcataactgcaaacactttgccgggaccataaatctgattgctttatgataaatttcttctataatggactttaattcatcgtgtctttgtttggcttgtgtgttgctgtttttgccacgaagtttgttgttgtaaggttccttttgaaaagcatagcgcttcacaaagcacattgatattatatccatctaagagcatacccttgatgtcggtatacttgtaattaatagaatcagttgccaaataagaagcggagcgtaatattttaataatggtttgactacgttcattctttcggcgtaggtcattgtagtctttccaattgacaaaatggcctttgaatttgtggttgtaattatgctcattgatccaaccatagatagtggatcgggaaatgcctctccttttgtgaatggacataactcattcatcggataagtaacattggagaatagcattcttttttttgtgtgtagatttggttatgattgaaacctcctatatttaaaatggtttctattatagtataaatttgtagctgattcaaatattatacaggataattgtattatatagattgaaaaaattgctgctatttagtataatacatagtatgaaattaacataaaggagtatatgcaaaatgttaatatcgccgtttagtgcaatcccatcgtgggaagggtttgaatatcagggatattgtgcactttattatgttttaaatatgattcttgatttaattaaagaaggtaacctaaagaggatagatgactttaaattgggattagagggtgaagatgattttttaattattgataaaaaccaatatataagtttacatcaagtgaaaagtggtgaaatacggttaaaagacaaggataaattttgttttatattatctattctacaataccaagcccaaagaggctatttacatatatgtgaaaaaagtgaaaaaagtataaagcagaattttgttgatacttcaagaaagttgatagatgaaatgttaaatgaattggataaagaggtaaaagaaaaaggtgaggtgtcacaatcctcagctggcgaatacttgtttatagaagatattaaagcaaacacttccaaaggctctgtatacaatatattatattatgtcagcataaaaccaattacaaagttaagtgttgtagaggcaaagaaaaaagtaataaaagagttaaatcaatataaattgaaacttaattctaaagatgaagatgacatatgggaaatagataaaaattattttaaaacaaaaaaagatattaaaaaaaaactgtatgatataattaaggaaataattttatataaagatagctcccgggaaatgtatttagatagaagtgcattaatgtttatttgtgatcatgtgtatttgtttatcaaggaaaatgtcgaggactcaaatactaaagagagaaaatgcaactgcaaaattgattttaaagatatatatgatagagtggtgtttcaatataaagaagaaagcaatacggtagaatttcaatattataaattgttagaacgtatagagaaaaaatttggcgaatatcctacggcggcaaagactatttgtaaatttgatgattgtgatgattgtggtaacaaagagaaatgtaatctgtataaacaaataaatcaaatatgtcaattgaatgttgaagagcaaattgaatttttgtataaacttttattaaaaactccagacaatgacttgcctaatgaaaatcttgtgaacagattggttatcacattattgcgaaaaattgataagctaaatttagaaaaatcaaatataattttggctgaaaataaaggagaatattatagattgacgttagattcaagtggagaaagctatgaattatccgcacaattaaataatgaaataaataaatcaacaaatgataaattgttaatatatgaaacagatgtcctgataacagatcagttaaatgaagcaaacttcatttatgatggtaataagtttaatgttatgggtgataatgaactccgggatattcaaacaattacctctgataatattgataggcaaaaaatgaacataaataggcccaaagttatgagattgattgatcgaaaaaatgcggaagaggagttattataaaatgttagacatattaagcaagatatttgaattttatcaataccaaaaaatatatgataaaaatataaatgatgagaataaggtgctattttataagcacaatgatgctcaagttgccaattattttcttgtctacagtttagattgtagagatatagaaaatgatgaaagaaaaataaaagaaagtttagacagccttgaagaattatatacaggtaaaactgatgctatacctttaaaaaaacagattttagaattatttgaaaatacacaagaggcagctcagatagataaaaacacatctgcaatatatttaatgaaatttaataatataaaaaagttaaacgaatataggaatttaatatattccatagaagaatctccaaattattttaaaagatatattttgccctatactgatattcaaagtcaaaaggttgaagattctcttgaaaaaaataaggaaaaaccaataaatgaaattttgagtcaaattattgatgacgaggatagttattatcagttggcggaacaaaaagatttagataattcatatggcttagtgattagaatgttttcgaaaattccgtttttgaagtattctttcaaagctgatatagcgcctgaacctatagataaaatgatagaaagtaaacttacccctaaacaattgaagttagaacacttcttattggatgacgaatttgaaattgttgacatattagagttggctgatccaatagatgaaaaagagttagaggatgaaatgaataaaattattgaagggattggaaaatgagttataaaataaaaaacttatatgtgaaaaactttaagtgttttgataataaaaaattttataaatttgagttcgaacctgatgcaaatccaacgattttatctggtcctaacggatttggaaaaacaacattttttgatgcaatagagcttgtttttactggaaagataacaagaatgcagctgaatatagaaagtaaaagcacaaatttaaataaaaatattctattaaatacttctgaagaatttggatatattgttttaattttaaaaaatgaagataatagttatgtaaccattgttgcaagtattaataatagctataaaaagattgatattaaaaattctataaagtatgcagtattgaaatattatttagatattcaaaaatttgatgaaattgttagcaatacaatgatatggaaagacaatatagatgaatttaagtttaataaagaacattttaatgtgtattattatatttctcaggcggaatctgtttcatttttgaagaaaaatatttcggatagaaaaaatagcattaatggtatgttgaaactagagaatgtagataagaaaattgaaaaaataaccagtaaattgataggaaaaaatacacaaaacaaagacgttttaattaataaagaaatccattctttagaagaaaaaatacaagagaaggcaacaaaaatttcaaaatataattcagaaatttcgaatgagaatattgaatttgaaaaattattaaattatcctgaagatgcagaattaaaaaagtgggatgatgatactgaaaagatggatgttctttccttatataaaaaagatgaatatataaaagagattcgtggattatcgctgttgtataagaatttatctgattataagcaatatctcgaaaatcagaaaataaagcaaattttaaataatgctgaaacaataaatgattttataaatatatatcggttttttacttccgacgagattaacaaagatcttgtaattgattatataaaaaaagaaacacaaaaaaatagtatctataaatatagtaaattcttccgtacaaaactagatttagaagaatataataaagataataacattaaattaaaaaacattggtgggattgagtttaaatttaatgtcgatgaaatagattctacagtaatacagattaataaaattagcaaggtattaagtgaactgcaacaaaagaaggaaaaaataaatactgcaagaattaatctgcatgagcttgctaaaactgatagagaaataacaacatgtccatactgtaattatgattaccaaaatgcagagcttttggaagaggcttataatagtcttggtattcaaatagaaaactcaaaggctactgaggcaagacaggtggatgaacttaaagaaaagttaaaagagcttacgatagaagatacagagttaattaatagtatattgggagatatgacagatgaaagtgtactaaagtctcaggaagaactattacaattagaacgtatactaaaagacgaaaataaaattcaagatttgatgaaaatcaaaaaaattattaaagatgattccttgtggcatgatttggataataaaatgaagatagttgaaataaagggaattatggcagcaagtactactgaatataaagatgctgattttgataagttgcttactgaatatgattttgttaaactttatgatagccatgaaacaatattacatttgaaacaagataaactattagattcgaaagcggtagatagtaaaattgcatatgttgaaaataagtttgttgttgctcagaatgaggaatatatgaacgaacgaaaggaattaagaagtgtattaactagaaaaaagaaactagaaaatttgagaaaacagtttgataatttaaaaaaggtgtatgaatcatctataaatgattataaaaatagtattattaagaaattgcggttgccattattaatatacacaggaaaaatactacaggattatcaaaatggactaggggtatttataaacagggatgagatgcgatttgtatctaacattgattccaagttagatatacttaatacatttagttccggacaattatcaggatttatactatcattcttgtttgctatgaataaacagtatatagtagaagataatgatgatattggttttgttcttattgatgacccggttcaaaccatggatgatattaatattgcatcttttattgaggttcttagaaatgattttcctaataagcaaataatattatcaacacatgagactgataaagaaaattatattttatataaattcttaaaatataatttaaaaggtcggtcatttaatgttaaagaaaaactttattaataatatatataaaagtaattaaacatgatttgagtgaacggtgtatatgctctaaatttgctatgtatctagatgaagttgtaagacacaatgttttagaatgaatataatgttgatgtcaaatataattgaggaaaaggcgggaatgaattatcggttaaagcattcagaggtagaaacctattaatttactaaattgtaaataaaagaggttatgatgaaagttacggttttgacaaccttatatattaaaataaaaaaattaacaaacactaaataatgtgaagatgatgaaataagaataaattgtttcacgaattgtcaatatagtttcaattatcagttggaggtaatgatagttataaacatgaaaacgaattgcaaagaaataaaaagaacatttagtttgtattagagtttattttggtagaagcagaccccgatcatctttcgcgactattcgcctgcagctcagaatatttgcataggatatctaaattgtttactcttcccacatttcaacggtaaagttgatacaacgaaaaaggcttggtttcaaaccttttttgcgttttaggagaaaaaatcggagtcagttttggcttcggtttttttattttctgtggtttttatttcctaaatcgtttcggttaaaagtaaccccctttggactatgtataaaaaatgatggtcgtttttgtgcatggttatgctgtattaaaaaaggatatatcaaggatatcaaacgccattaatttcaaggaaagggaatctatatgacaatgtttcactaacactaagcatatatccacctgttaataaacaggaatattctcttctgaaagttatttgcagtccttatcagtgcctatgcttactcaataccattcctcactcctaatttctaattcctcattatcattacgctgtactaagttgatgtcatagcatgttaataatcattaagaaaagttaatagagcgaacaaaacagttttgctttttcgacaaaatcattgaaataccgagaattatatgctataatataattataatcacttatactcatacggagagaaagggttgacaaaatgactgttagttataaaaagctatggcatatgttgcttgacagagatatgaagaaaaaagatttgcaggaggctgccggattatcaggatatgcaatgctgaagcttggacgggacgagaatgtgacaacagaggttctcggaaaaatatgcggggttttgaattgcactacggatgatattatggagtttattcccgacaaaaaaactgcggacgataaagcaaagtctattttttaggatagtaaaaatgacatatcatagtaaaaatacaatcagaaagggacttttagatgaataaacaacagcttgcaaaccgtatttgggaatcagcaaacaaaatgcgctctaaaattgaagccaacgaatataaagattatatcttgggctttattttttataaatacttatctgataaggaagtaaagtttttaatagaaaacgactacacggatgagctgctgcctacggtgactgaagatgatgacgaaacggtcagatgggttcagcagaacctcggatactttatatcctataataatcttttctctacttggatatctatcggtagagattttgatgtatcaaatgtgacggatgcactttcggctttcaacagaaatatcagcagctcgcataaaaaagtatttgagaagatttttcaaacgcttgaaacaggcttatcaaagcttggcgacagttcaggtgcaagaacaaaagctatcagcggtcttttgcagcttatcaaggatattcccatggacggcaaacaggattatgatgttttaggttttatttatgaatacttaattgaaaagtttgcagccaatgccggaaagaaagcaggagagttttatacacctcacgaggtttctttattgatgtccgaaatcgttgcaaaccatttaaaaggcaaaaatgaaattgaaatctatgattcgactagcggttcaggttcgctgctgattaatattggcaagagtgtttcaaagtatatgccaaattccgataatataaagtattatgcacaggagctaaaagaaaatacatataatcttacccgtatgaaccttgttatgagaggaattaatccgtccaacatcacgacaagatgcgctgatacgcttgaagaagattggccgttttttgatgaaaacgacccggttaatacatacgagacattgtatgtggatgcggtggtatcaaatccgccgtattcgcaggcctgggatccgtccaataaagagtctgacgcaagatattcacgcttcggtcttgcaccgaaaggaaaagcagactatgcctttttgctgcatgacttgttccatataaagcctgacggaattatgactattgtacttcctcacggtgtgttattccgtggcggtgaggagggcgaaatccgcaaaaatcttattgaaaacaaccatattgacgcaataatcggacttcctgcaaatatatttttcggaacaggtattccgacgataataatggtacttaaacaaaaaagagaaaataccgatgtcttgataattgacgcttcaaagggctttattaaagagggcaaaaacaacaagcttcgtgcatctgatattaaacgtatatcggacgctgttgctgcaagagctgattatccgaaattttcaagagttgtaactcaagatgaaatacgaaaaaatgattataatcttaatatcccacgttatgttgacagctccgaaagtgcagagtcttgggatatttatgcttctatgttcggaggaataccgaagtccgaaatagacgaattgtatgagtattggaaagcgttcccaaatttgaaacagactctgtttaacgataacggcactccatatttaacacttgcagcgaatgatattaaatcgcaaataaaaaatcatgctgatgttattgagtttgaaaaagctttcggagacacctttgcgaacttctctgactttctaaaggatgaactcttatcaaaaatgacaacacttgcaataacaaagactgaagatgatttgagcgaaaatatttttgacaggcttaaaaatattcctttgattgaccgttatgaagcatatcaaattcttgatgataattggtcaggtatctctgtcgacttggaaattattcagactgaaggctttgaagcagcaaaaaaggttgacccaaagctgataataaaaaagaaaaatggcagggatgaagaaatacaggacggttggacaggtcatgttattccttttgagcttgtcggagaaactttactcagtgatgactatgctgcgcttgcagccgatgagaaccgtctttcagaaattccttcagaatatgaagatctgctcgaaagcctgactgaagaggaaaaggaaagcgatattcttaatgaatccggtgacagctttgtcgcaaaggaagtaaccaaaaagctcaaggcattgaaaaatgaggagaaaacgaccgaaacagctaaatttatcgaaaaacttaaaacatatgaaaagctcgcaaaggaagaaaaagaattaaaatcctcaataaaaaagaagtcagcagaactgcagaagaaaataaagataactattgaaaatctgagcgatgaacaggtgtatatgttgcttgaaaagaagtggattgaaccgcttattgaggggctaaaaggattgccggacacacttgtagacacacttgtaagtaaaatctctgcattacagaccaaatatgatactacacttgacgagattgaggcacaaatcaaggaaacagagtcaacactggcagaaatgattgacgagcttgtgggaaatgaatttgacatgaaagggctcagcgagttcaaatcgctgcttctaggtgaataagatgtcagaaaaaaagaaaccggttgtcagatttgccggatttaccagcgattgggaacagcgtaaggttggggattactgtgatatgttcaatggagatagaagcgtaaagtatccgagtgcacaagatatggttgcggatggaattccatttataaatgcaggagatttagaagatgggcgagtgaagttaagttctgccaataaaataacacgtgaaaaatatgatgatttaggaggggcaaaactgcaacttggagatatagtgtattgccttagaggaactcttgggaaaaatgcctatatagacaactttgatgaaggaacagtagcgtcatcattagtcgcaattcgtcctaaaaatatagatggtagatatttatttcatgtatttaattctgacattgaatatcgacaaagagttgtccatgatgaaggtgcagcgcagccaaatttgtctgcaaaaagcgtatcagaatttttgatgccagtaccagatatagatgaacaaaaaaagctttcttctttttttgaccacctcaaccaccttatcacccttcatcagcgcaagtgtgataaattaaagaatgtgaagaaatctatgctcgaaaagatgtttcctaaaaatggacgcaaagtgtccgaaattcgttttgctggatttactgatgattgggaacagcgtaagctaggtgagattgcaacaaagataggcagaaatgacccggagtcaacagcaccaataatgatgataacagcgaataatggatttattgaacagtcagagagatatgcttttaataatgcaggtaagagtttaaagaaatacattattcttaaaaatggtgaacttgcatataatcacggtgcttcaaagttgcgtccttatggctcgtgttttgcattaaccgatgtagaaattgcccgtatcccctttgtttatcactgtttttctgttggagaaaatgattcagaatttatttcactcgaactaaatgggtctaatgttgaaaagcaacttcgcagaattgtttcttccggggcaagaatggatgggttattaaatatatccttcgaggaatattgtattgttggacttaatctcccaacaattgaggagcaaaaacaaatcggaacatttttccgcaacttagattacctcataaccatttatcagcgtaagttggaaaagctgcaaaatatcaagaaatcttgtcttgaaaagatgttcgtttgataattaggaatgaggagttagtaattaggaatgagaaattgctatttgctaattaaataaggagcgaggaatgaaagaaaatgtagttgttgaaaaatcaaaggcttttgctgttagaatcattcaactttataaatatatgtatgaaaataaaaaagagtttgtaatgtcaaaatagattttaagaagcggaacaaacattggtgcaaatattgcagaggcggaatgtgccttcagtaaaaaagactttcttgcaaaaatgtatattgcatttaaagagtgttcggaaacaaaatattggcttgagttactatataaaactgaatacttgagcaaagagtaatataatagcattgatagcgactgcacagaattattaaaacttctatcaagtattacaaaatcgacaaaatatagataattcctaattgctaattcctcattaaacaaaggaaggagaaaaattatgccgttcacaaaagaggccgattttgaggaggcccttataaaagtcctttcaaacaagggttgggaaaatgaagtaataagtcatcccacagaacaggacttgattgataattgggcaaacattttatttgaaaataatcgtggaattgataggcttaataactatccattgacaaacggcgaaatgcagcagattatggagcaaatcaataatttgcgtactccgcttaagctaaacggatttataaacggtaaaacggtatctattgtcagggataatcccgatgataagcagcatttcggaaaagaaatcagcttgaaaatttatgaccgccgtgaaatcgccgcaggtcaaagccgttatcagatagtacggcagcctatttttccggcaaagtcaaaaatattgaatgatcgtcgtggtgatttaatgcttttgattaacggaatgccggttattcatattgagctgaaaaagagcggtattcctgtaagccaagcttgccggcaaatagaaaaatattcgcatgagggtgtctttaccgggctgttttcgttggtgcaaatatttgttgcaatgacgccggaggagagcaaatactttgccaatcccggaccggacggcagtttcaatccgaattactattttaattgggcggattttgataacgaaccgataaataattggaaatcaatagcgtcgtcgctgttatccattcctatggctcatcaaatgataggcttttacactgttgccgataactcagacggcgttttgaaagtaatgagaagctatcagtattatgccgcaagcgctatatccgataaagtttccaaaacaaaatgggacaagtctaatcagcgcggcggatatatatggcacacaacaggttcgggaaagacgatgacgagctttaaatcagcacagcttattgcaaattcaaaagatgccgataaggttatattcttgacagatagaatcgagctgggtacacagtcatataatgagtataacaattttgcagatgagaatgaaagtgtgcagaaaaccgaaaatacatatgtgcttatttcaaagctgaaaagcattgattctgcagatactcttatcgttacatctattcagaaaatgagcaacatcaaatctgaagatgatggttcaaatgcccatgatattgatataatcaataaaaaacgcctggtatttatagttgatgaagcgcacaggtcaaccttcggcgatatgctgcttacaattaaagaaacatttccaaacgctattttctttggttttacaggcacgcctattcaagaagaaaatcaaaagaaaatgaacactacatcaacagtattcggaagcgagctgcacagatacagcattgcagacggtattcgcgacggtaatgtgttgggatttgacccttataaggtcttgacttttaaagattccgatattcgcaggcaagtggcgttggaaaaggcaaaagcaaaagacgctgatgaggtttttaataacccggataagtcagcaatatactataaatatatggatgcgtcacaagttcctatggcaggctataaaacagatgacggaaaatatattagaggtattgagaattccatacccttttcacagtacagaaccgaagaacatcaaaagaaagttgtagaagatataaaagaaaaatggcaggatttaagccgtaacagcaaatttcacgctatttttgccacaagcagtattcctgaggcgatagattattatagacttattaagtcggaaatgcctcagctgaaaaccacttgcttatttgacccgaatatcagcaatgaggacggcgattataaagaatataaaggtgaaaaaatagctttttttaaggaaaatggacttattgaaatcatagaggactataacaaggcgtttggacaagacttttctattgcttcgcatgcagcgttcaaaaaggatatttcctgcagaatggcacacaaggagcaatataaattgattgacaaaacactccaaaagcagcttaatttattgattgttgtagaccaaatgcttacaggttttgactccaagtgggttaatacattatatcttgataaaatgcttgagtatgaaaatataatacaggcattttcaagaacaaatcgaattttcagacaagacgaaaaacctttcggcacaataagatattacagaaaacctcacacaatggagaaaaatatagaagcggctgttaagctttattccggcgacagaccggttgacctttttgttgacaagctgggacataacatagaaaaacttaacgggatttatcaggagttaaccgaattatttacaaatgcgggtattcctgattttgaaaagcttccggatgaaaaatcagtaaaggcaaagtttgcatctctctttaaggattttaacggctgtttggaagctgctaaggttcaaggctttaattgggataaacactcgtatgcagatgaagaaacgggcaaaacacttgatgtcatgcctcagttcacacaaactcaatatcttgttttagttcaaagatataaggaattaacggaaagaaggccgggtgaccgatcaggtgaagttgatgttccttatgatttggtcggttatattatagaaatagataccggacgtattgatgccgattatatgaacagccgctttgacaagtatatgaaactaattcatcaagatgatgctaccgccgaagcgcaggaagaagccttaaatgagcttcataagacgttcgcggcgctcacgcaggatgaacaaaaatatgcaaatatctttttgcatgatattcaaagaggtgatgtttccgttgaggaaggaaaatcgttaagagattatataaccgaatatctatatcgtgcgaagaacgctcaagttcatcagtttgcagccacattcgatttagatgaggaaaaactccgcaacatgatgtcgttaggtcttacattgagtgatattaatgagttcggacgttttgatgagttatttaaaacatttaataaggagaaagcaaagttgtattttgaggaacaagagggcaaaaaaatcgttcctccgaaagtaaatataaagatggataaattacttagacaatttattctcgagggcggatttgagatttaaaattggaatgaatttgtgacatagtaagaatctgaagcattgaggtttggatttttactatgtcatttattatatcaatatttatgtgtctttacggtgttttttacaggtcacatatcaaggaatagtaaattcctattattgctatactaagatcaggacggtgaaataatcatgaagaagaaaatttattttgcaggcggatgcttttgggggacacaagcctatttctccttgctgagaggtgttgtaaatactcaatgcggatatgcaaatggaacagcgaaaaatcctacttatgaagatgtgtgccgagggaatacgggacatgcggaaacagttatgatagaatatgatgattcgatgattaaacttgataagctgcttactgaattctttaaaactatcaatccaacgatcaaaaatcgtcagggaaatgatataggaagccagtatagaagcggtatttattatgttgacgacgcagacattaatactattcaagaatttattgaaaataagcagcgtgaatacagcagaccaatcgtgaccgaggttttgcctttattatgttattatccggcggaggaatatcatcagaattatctagataaaaatccgggaggatattgtcacgtagatttgaacttgattcaaaaggatgataggataagaaattagataaagattaaaggaatttataccatttaattgaaatcaatctgcagaaatctgttgacataaaatgaaagatgtgatatactccggtaaagagtagaagtaaggaagagtttacttaatagtatctctgaaataattttattaaattataattaaagcataaaaagtactcgtatagataatctgtacgagtatttttgatataaaattatggagtggaaccttatttgttaagttataaatacaatgctaaattgtgtattatggatttattaaaaattaaaaggcagtatatcgggcttttgatatttaatatcagagctgaaaacttcttctattgtaggaattgagtttgaggcgccggcttttgaaacaactaaagaggaggctcggctggcggtttcaagagatttttcaatagaatcgccaagagcaagccgaccaataaaataaccgataaaagtatcaccggctgcagtcgtatctactaccggtacattataaatgccatacgaaagaactgtatttttgtatatatatatacatccatgctttcctaatgtaattaaaagatgtgtttccggaaaattagttaaaagccatgaatttgcgcttttaatatctttttttccggaaatgccaagacactcagttgtattcatacagaggtactgtattttctccagtggtaattttaatacatttttattgaatggcgccggattaaaaactatattaagtccacgttttgctgactggttaataatatgttcaagacaattgatttcattttggagaagcagtatatcacccttttcaaaatgctctaatactgaatcagcgtaatccttggtaattttttgatttgctccgccgtccaatacgatacagttttcaccggaggaatctataaggataactgcatgtcctgtgggaatatcacatatattgattaaagaagtgtctattttatgtttttttaatacatttattaaatcatttccgtcctgtccgatttgaccggcgtgaaatattggatagccgctgctttgtactgcaatcgattgattaagtccctttccgccaaagaatctttttctattcagagcggatattgtttcgccaggtgaaggaaaatgctgtatttgatatacataatcaaagtttagagaaccaaaattcaaaattttcataataaatatcctttctttataagattatcaataaaacgttttacttggttttattatgacccaataaagtggaaaagtcaacatagaattagaaatttaatagattaataatataaaacttatcaataattgtattattgtttttataaaaaatgagtaggagataacatgggagtaacaatcaaagatattgcaaaaaaatgtggaatttctattacaacggtatcgctggtgcttaatcataagggcgaacacatttcaaaagagacgaaaaataaaatatacaaggcagtagaggaattaaattatcagccaaaccaggtggcagtaagtatggtaacgaagcggactaatacgattggtctgatacttccggatataagtgatcttttttattcaagttttgctaaagaaattgaaaggaagtttagcgagaagaattataatgtgatttatggtaataccttatcttgttttgacacatgtatggaatatctgcatatttttcaaaagcgtaatgtagatacggttgtaatcgtatatcctgattatgctatgacagaagcacagaaaaaaaggctgaattcattttttgatttttcaaatacgcctgttttatggatagaccatggattattaagaaaagaagaaagcgtagtttcagttaatcagaaaatgggtggatgtttggcggtaaaacatttaattgagttgggacatactcgtattggatgtatatgcggaccgcatgattcaaaaatttcacaggaacggcttaagggatataaagagactctaaataatgcaggaatttcttatgattcgcagttagtgtatcatggagagtttgatattgaaagcggttcaagaggtattgaggaattactcaaatacggtattacggcggtatttgcatgtaatgatatgatggctttgggagtatatgtgcaaagcagaaaaatgaattttcaaattcctgagcagctgtcggtagttgggtttgataatgtatatttgaccggagcactggagccgcctctgacgaccatagtacaaccgatagatgaacttagcgaaaaaatagtatcctgcgctttggaattaatcaatgaaaaaagatatgaacatgtggttatgaatcccagtttgaaagtaagaagcagtacggctcatccggtaatgataaaaacatagtaaaaaatcccaataaaatcaaaatatattttgattttattgggaattttttttggtaaaattacacaaatcactattgacaaactcagataagagtgatactataattttagtaaaacgttttactaactttaattatctaataaaaaagagatggttaggatgaatccaaagatgaaggacattgcttcaagagcaaatgtgtcggtttctactgtttcaaaaattattaataaggagacaaaaaatttccgaaaggaaaccgtggatcgggtacaaaaaattataaaagaaatggggtatgcgccgaatatagttgccaggagtatggttactaaaaaaacaggtttaataggattaatcctgccggatatttcaaatttatattttgctgaaatggcaaaaggtatagagattgcgttaaggcatatggaatataatatgatactatgcaattgcaatgattcagacgaacgcgaaaaagcctatattgatattatgaggcaaaaatgtgtagacggcattattttaattccggtgttaagctcaagtgtagacattacgtatacaacaatactcaaaggaatcccatttgttattttagacagaatattttcaaaggaaaacacacaaatagacagtgtttcttttgacaatattttaggaggatatatagcggtaaaacatctaactgattatggacataaaaaaattggctgtgttacaggaccgttgttaaataaaagcgcgcatgacaggtttataggctttaaaaacgctttagctcaggcttctattccatttcagtcagaattaatttgtcaggcagattataagtatcagggtggatataaggcaacacacaaactgttaaaaaataatattacggcgttagtagtacagaatgatttaatggcatgcggcgcttatcgggcggcacaggaaatgggaattgaaataccaaatcagctaaatgtgattggatatgatgatacagattatactcagattttatttccaacattaacatctgttttacagccgaatcagaaaatgggagaagcggcagctaaaatgttggttcataaaatacaaaaaagtgattatcagaataagatagtttttaagccgctgttagtagtaagagaaagtacatgcgctgtagtttgaagtatatttacaaagagtaaatgaagggagacttcataatgaaaagaattttgcttgcaggtgaatcttggacaagcgttacaacacatattaaaggatttgatatttttacaacttcacgttatgaggaggggggagacagactgataaaagcgcttaaaaatggcggatatgaagtggatttttgccctaatcattatgcgggagaacattttcctgacacagtagaaaagctgcgcggatatgacgctgtgtttttatcagacattggctcaaacacgttacttttatcggatagagtgttttcatatggtgatacgcagaataacaaatgtacggcgataagagattatgttcttgccggaggggcactttgtatgataggaggttatctttctttttccggaatagatgctagagcaagatatgggaagacggctgttgcagatgtacttcctgtaaagatattgccttatgatgatagatgtgaacatcctgaaggagtttttccgactgtgtcaaatgatacgcatccgttaatgcaaggtattaacgaggagtggccgtgtttcctgggatacaacaagactgttgctagatgcttgccggcatgcaaaacgattgctaagatagacggagatccatttatatcagtaggttcttttggtatgggaaagtcggctgcatttacatcagactgttctcctcattgggcatcacctgattttatgagttggaaatattatgatacgttttggtgtaatcttgctgattggctgacaaaataaaattattaaattacaacgaaggaaggaggatagcaatgatgaaaaagcacatgattgatatgatacattcaaggggattcagttagaatttatgatttgatggaatggcaaatatttaagacataatgcaggattgttttatgggtgtgttatggagcatctgaagaatattgcggtaacgtatacaagttaatctattaatacatatttgtgattttccatagaagtaatgttttctgctatggagattaggtaagcgctggaataactatctgcagatataatgatgttctgtggctgataattttgagattgagaacacagacgagcattgtcgtttattttatactactatctattggaagaacaggattgaaacaggatgaattatgtatggaaaggtgtgaaaaaatgaaagaaatttgttggaaaattactgttgtggagcactgtatttttaaagatgttggacgcggacagacattttatggtgcacataatcagaaaaatgcagattttccggaggatcagccaggtaatgtaacgatacttcaaggaggcggatacaatattctcgtagatacaggatttaaaaatcctcaatttatagaagcttataacgcagaaaatgtattgaaaccggagacttatcttaagcctttaaatttgcatcctgaccaaatagatgcggtgctgttatctcatttgcattatgaccatgtgggaaatattgattgctttaaaaatgctaaagtatatgtgcaaaggtcagagcttgaggggtggcagtggtctgcagatctgtcagaggattataaattacttaactgttatttggatccggaggatttaaaaaagctcgagcaggtgaaaaaggaaggccggcttatattgtcagaggacggtatggaaaatatttttccgggaattgatttgtatttggcaaaggggcattcatacggtacgcaagttgtgagagttaaaactaaaaatggaaggtatgtagtcactggagacgcagcctatactttggagaatattattaccatgacgcccatgggatatggaattgaccagctggatcagcttcagtcttttgaaaagatattaatgctggcagatggaaatattaataatgtaatccccgctcacgatctagcctggccgacacgttttaaaagcactgaaaaactggaaggactgcctaacagaattacgtttgtcacacagaattaactgtggtgcacaaagaaaggagaaaaatcatgaaaaagaaaattaaagcaagccgtgcggtgtgtcttatcatcgcttgtttgtttatgtttgcaagcgttgtttcactgagttcctgctttggcggcaggaatgagacaaaaaagaaaacttttgggattacatatatgacgatgaacgatcctttctatgtatcaatgagtaatggaattaagccaaagattgaagaactgggcggagaactaatagaactggatgcaaaatttgatcagaacaaacaaaattcagatattgaggatttaattcagcagcaagtggatcttatttttgttgttcctgttgattcaaaagggattaaaccggctttggaatcgtgtaaagcggcaggtattcctgtggtggatgtggatactatggtggatgaccctgatcttgtagttacccaggtagcttctgattgtattaagttaggaaaactttgcggagaggcgatggcaaaagctttaaacggttcgggaaatataattgttattacaacggatgtgattcgtccggcccgtgacagatctaccggatttaaagaggttatgaaaaattatcccggtatcaatattgtacagtatcaggatgcgcaaacttgcagcacggaggatgcacttggattgatggaaaatatgctgcaggcacatcctgatataaacggcgcctttggaacaaatgatgctattggtcttggaatatatgcggctgcgaaaagtgcaaataagattggagatgtgaaaatcgtttcagttgatggatcggagcgtgtttgtgaactgattaaaaacaatgagtatcttggaagcgccgcacagttccctgaaaaaatgggagtgaaggcagctgaggtaggctttggcgttcttaacggagaagaataccctaaggagatattattggatgtggattttgtagattcatctaatgtggatgagtttttaaagtagagttttgttttttaggctgcgactggaaatagaggtgaatagtatgcgcttaaaaaaaacagttttagaagcggaaggagttaatttatccttttcaggtgttaagatattgcatgatatccattttgatctagcagagggagaggtacattgtcttttgggtgaaaatggagctggaaaatcttcttttataaaaattttgggcggtatctatcatgcggatagtggaaaaattacaattgataataaagaggttatgattcgcgatgttacggattctaagaaattgggaattagtattatacatcaggaattgtgtttagcggataatttaagtgttgcccaaaatgtttacttgggaagagaaccggtttattccggcatacatatgatgaatgatgagaaaatgaaccgtgataccgctgagctttttaaacggctgaaaatcgagcatatcaagcctcagacattgatttctgagttaaaaacatcaagccggcagatggttgaaattgcaaaggcactttcaatggaagcgcgtattatcattatggatgaaccgacatcttctctaactgacaatgaagttgaaaatttatttgagtttattagtgaactaaaaggaaaaggaatatctattatctatatctcgcacagattggaggaaatatttgaaatcggagaccgagtaacagtttttagagacggaggatatatcactacaaaagatgtgaaaagtactgaaagggatgaacttattacattaatggcagggcgtccggtttctgaattctataaagcagataaacataatatttcaaaagaagtggtgctggaggtaaagggattcagcagaaaaaacgcatttcaagatattagctttcagctgcataaaggagaaattttaggactgtcaggattagtgggggcaggccgtacggagcttgtgagggcaatttttggtattgaccgtatcagctgcggagagctttttctttatggtaaaaaaacagagataaaaaatccatctcaggcaattgctgaagggattgcgttggttcctgaagacaggaaggaacaagggttgattttgattaatacggtaagattcaatatgacgcttactattttaaaacagtatataaaaaggtttaagataaataaaaaagtggagcggcagataattaaccgattaataaatgatcttgcaatcaaatattcaggtgaggatactatctgtgttaatatgagcggcggaaatcagcaaaaggtagtattaggaaaatggcttgcaaccaatccaagaatactcattttagatgaaccaaccagaggaatagatgtggcaacaaaggctgagctgtaccgtatgattcaaagtttggctgatgaaggaatcgctattctaatgatatcgtcggaactgccggaaattgttaatttatgcactcgggttttagtcatgtatgagggcagaataactgcggatataaaggaaaaagagcagataaatcaaattaatattatgcattatgcagttggaggtgtgaaatgatgacaaatagtaagtctttagcggaaaataacagccggataaaagatttttttaggtatatcgggcatagtatttattccttttttaaaaggaatatgtatatttttattggtttgattgctatttgtattattgtaacacttttaacagataagttttttacagtcagtaatggaatgaacattttaaggcaggtatcaaccaacgcattgctggcttttggtatgacgcttgtaatgatttcgggaggaattgacttatctattggctcaatagttgcagtatcaggtacatttgcaattggtttgagtgtttcaggactaccggttattatttctatttttataggaattgttgccggtacagctcttggacttataaatggtttggtaatcgcaaaaactcatatgccagctttcatcgtgacccttgcaatgatgaatattgcgcgtggaatagcgtatatatatacaggaggtttgccgataaactttaatgatcctttatatagctttataggaaatggttatattggcggcttttttccggttcctgtttttataatgctggtgctgatgatatttaatggtttgttgctttcaaaaagcagatttggcagacacatatatgcaatcggcggaaaccgtaatgcggctcaattttctggcatcaagatttttaaagcagaggtgctcgcttatgttataagcggattgttggcttccgtaacgggtataatgctttcagccagaatgtattcagcactgccaacagtaggtcaggggtttgaaatggacgccattgccgccgttgtgctgggaggcacttcgtttaccggaggcagcggcagcattggcggtacaatgattggtgttttgataattggtgttttgaacaatggaatgaatttacttcaaatcccattttattatcagcttttgctgaaaggtgtagtaattgtatttgcggtttatttggatacgatgaaaaagcgaaaagctggtgtataagttaatttttaatttctaaatataagcaagaccgtatgcaaaacaccgcatccggtcttattttttttaatcactcggtttatgaatttattattcaattaaaagtaataaaataaatcattgtacgtataataaaaacaatagccactgtcaaaaactaaagacagcggctatttgtttattatcaatcggcgctgagaatttatagggggaactataattctgttatcaataaacgccggctaggttattattgaattaattttctctaaaatattaattattagaattttgttcaagttcaagtttttctttttcaactatttcctttgttctaaagtaaactgtcttctgaagctctgtgaactcctgcaaacctactttattcatatctgaaatgtattggttccagtcgttatcattgttcggatctacgtttcctgaaaagaatctttgtatatattcatctctttttgcattcagagcagtttcaagatcacggaatctttgttcttcgtccggagtatatctcataggtatctgttcaaaatagtaataattatcttttgccataaatgcattgtataattcatcgcattgtactccgcgaagtctgttccacatatggtcttcctgtttaaaggttgacaccgacaatccatattcagctcctaatgtcttatcttttttcttgtctgtctgaggattgctgtcatcataccagcccggattcattacaggttcaccattttcgatatggtaactgtaattgtcgttttcaattgcttgtctcaaaacctccgggtcatctttttttactccgaacgttgtatagagctggccttcttctgtagaaatccaattaaacattttgaataaagcgttatatctgtccatatcagcactgatgcctttgctgaatgcgggaccccaattggaatacagagggtctcttttaaatattgtgcctttatccgggaacgcggtaaccatgttatcagaccactgccaatcaacatttttgttttcattgccgccctttgttttacgattaaattcctctatactataaatataattataagttataaagcagttatcggttgcaagtctttttgaaaaattgtctttgtctacagtaaataattctctgtcaataaaacctgcgtcattaaatttcttgattgttttatacatttcccttgcgttgtcagttgtaagcgcatacggaacgtattcgtccgtaacagggtccacataagaatgctgctgcatgataagttccggtatccaatatgcttggcaaaatcctgttattgcgctgccaggtgaagtggttcccataccgttgcaggagatgataattttatcaggatatgccgccttgatttttgaacatacatcataaagttcgtcaatggtttcagggaagtcgttaattcccaattcatcaaatacatcttttctataatcccagcacatggcagccttattttgccttaccgttggaagatagtataactttccgtcagagtttttggctaatgacaaaatttcattgaaatcttctttgctccagagagctttccaatcttttaaaacgcagtcgtctccggtataagcttcttccggaattggttcgagataaccgtctgacgcccattttctatactgagcttcttttcctccgcttgtaaagtcagcttcgtcaccgactgcataagaaatattggtttttgtttcccaatcgcctctcggtattctgtcatattccaattcaatattaaacttgtctcttatgatattggcaaaattagtatcttgcccttcagcatactccaccccatcagctgtatacatattaagacggtatgtataaattgtttttccatccttagactcataggagttttggctttttgttccgcatgacgctagacttgttacagccaaaataatagatgttccgaggacaattaatttttttaatttcataaaaatacctcccaaacaaatcttttttattttattataacaattatataacttaattgcattaagtaattaagaagaatttactaaataataaacttaatttatttgaattataaagtagtattaaaacagatgttattttttattgacttctttaacagagtttctttttatcagtgaagtatttatttcagtttttataggaggctgaccgggattgttaagcagggatattagtctttctacagctacctcgcccatatattttttcggaacatttattgtagatagttccggctcaaacatgctgcttgcgggcatgttatcaaaacctattactgaaatatcttcgggtatacgaattccattttctttaaacgctttgattgctcctaaagctattaaatcattgtcggcaaaatagcaggctgccagttcctctccgctgtttattaactctgacatatcagagtatgcaccgtctattgaaggcggaaggttatgaacaatacattttgaagcagacataccggcagagcgcacagcgttgtaaaagccggtagaccgttcgttaaaattgcttatattatatgtagattttagatatcccggctgaaatttacatttattaattaagtgtttggcagctaaataagcgccttgaatattatttattaatacataatcacaggatattgtttcaaaatatgtatctaatattactatcggtatcttaatgtctataaacggaatcaaattttcaggcagtatttccgtacctaataaaataatgccggaacagttggaatatttaatatcttcaaactgtttttgtattgtgtcctcatcctcttgaaagtataagatgtttaaacgataattatttttcatacagccgatagatataccctcggataattgagaaaagaaaggcgtgtcagccactatcgcgccatactttttatatataataaaatatattgtgcccggtgaagcaattttttcagaaatccgagtaaaatcatatccaaacctttcagcggcgtctagtaccatttgccgtgtttttgtgctgacccccggttttttatttaaagccatagaaactgctgctgcggaaagatttagtttcttggcaagttcttttgctgtaattcccatagtaagtctcctttataattctttatattattaatatacacctatgattaaataaaagcaataattaagtttaaaattaagtaaattatacttaattatctggtgaattttagtttgtgaaggtttataattcaaattagataagattactttatagttagaaggagaacggtatggaaaaaataaagttgggctttgctcctaccagacgaagtatatttagcgcgccggacgccgttaaatatagaaatttaacggctgaaaaacttaatgaactcggtataaagtttgttgacataacagatataaatattgaaggacttttgtataacgatgaagatatggagaaaattgccgaaaagtttatgactgaaaaagttgatggtttaatgcttcctcattgtaactttggaactgaatttgtatgcgctagacttgcaaaaaagcttaatgttccggttttgctttggggaccgctggatgaaagacctgattcaaatggggttaggcttcgtgacacacagtgtggattatttgcgacaggaaaagttttgagaagatttaaggttccgtttacatatcttacgaattgccgtcttgacgaccctgtatttgaaagaggagtaagagattttattgcggtctgcaatgtggtaaagacatttaataatatacgtattctgcaaatttccacaaggccgtttgaattttggtctacgatgtgcaatgaaggtgaattgttagaaaaattcaatatccagctgtctccaatacctatgacagaattggttgaagaggttaaatccgtaaggggtaataaagcggaattatgtcagatgattgcctatattgaaaaaaatatgattgtaaaaataaaagatgacgcggttgaatctgtggcggctctagcaattgctttgcagaatttaatcagtaggtatggctgcagtgccggagcaattcaatgctggaatgcattgcaggatgaaataggaataatgccgtgtgcagcgaattcaatattaaatgaacaaggaataccaatagtttgtgaaactgatatacatggggctgtaactgcattgattgcagaagcggcagccatgaatgaaaaaagaggattttttgccgactggacaatacgtcatcctgatattgaaaacggagaactgctgcagcattgcggaccgtggccaatttcagtagcaaaagaaaaacctatgctaacatatccgcttgcatttgattatcctggaagcttaacagcagaagcgaaacatggagagttaacaatttgcagatttgacggagacaacggagaatactcattgcttttaggaaatgcaaaaggcgtggatggtccaaaaggaatgggaacatatctttggattgaaacagataacataaagcggcttgaagccaaaatcgtagaaggcccatacattcatcattgtgtcggcatacataaaaatgttgtaccggttctttatgaagcttgcaaatatataggtataagaccggatctctatgaccctatagaggaagaggtcaaggcgtatttgcggggcgagtaaaaattaaaaaggagaaatattgatatgaatttgaaagctctttcttataagcttagaagagatgccattaatataatatgtgcaggcaaaacaggacatatcggaggagatatgagtgttatggaaatccttgttgaactttattttaaacagatgaacataagtccggaaaatatggatgatgaaaacagggatttgtttatattaagcaaaggacattctatggaagcatattatgcggtgctagctgagaaaaactttgtaaatttagatgatataataaagaacttcagtaaatttggttcaaaatatataggtcatccaaacaataaactgccgggcattgaaatgaattcgggttctttaggacacggtcttcctgtatgcgtgggtatggcaatagcttctaaaatggacaaaaaaaataatagaatatacgttgttatgggtgacggagagttggcggaaggctctgtgtgggaaggcgcgatggctgcgcggcagtataagctggataatttatgcgcggttgtcgacagaaaccgtttgcaaatttccggtaacacagaagatattatgggacatgatgacttgcatgaaaggtttaaaagttttggctggactgttattgatgttaaagacggaaatgatattgatgagcttgacgccgcgtttgaaaaagctaaaactgtaaaagactgtccgtcggtacttattgcaaataccgttaagggtaaggggtcaagtgttatagagaataaagcaaattggcatcacagagttccttcggaagatgagtatcagacaataatgaaggatttaaaaactgctgaggaggtgttattgaatgatggacagtaataaaaaaacagcaaacaaacaggttatttgtgaagtattgatgaacgcgtccaaaactgataaagatatagttgcactatgcagtgattcaagaggcagcggctcatttacaccttttgcagatacatatcctgaacagtttgttgaaaccggcatagcggagcaaaatttagtaagtattgctgccggtttgggtaagtgcgggaaaaaggcgtttgctgtatctccggcctgctttttgtcaacaagaagctatgaacagtgtaaagttgacgtcgcatattcaaatacaaacgttaaacttataggtataagcggaggagttagctatggcgctttaggaatgagtcatcattctgcgcaggatattgcggctatgagcgctgtgccaaatatgagagtttatataccaagcgacggtgtgcagacgaaaaagctgacagaagctttgctggaggataataaaccggcgtatatacgtgttgggagaaatccggtagatgtaatttacagtgaagaaaatatagattttaagcttaataaggctaatattttaaaaaaaggtacagacgccgcaattattgcgtgcggcgagatggttaagcccgcactcgacgccgcaagagctttagaaaatgaaggcataagtgtttctgttgtagacatgtattgtgtaaagcctatagatgaaaaaacattgctgaaagcagctgaaaatgtaaatgctgtgctaactattgaagagcattcgatttatggaggtttaggttctatggttgcacaaataatctcaagagagtgtcctaaaaaagtatataatatggctcttcctgatgaacctgttataacaggttcatcaaaggaagtgtttgagtattacggaatgaacagtgaaggtatcaggaaaaaaataaaagaattaatctgaagcggggtgaaataaagtgccgcagaaatatataataagcattgaccaaagtacgcagggaacaaaagcgctgctgtttgatgaagcaggttttttgataaagcgggaagatatacctcacagacaaattgtagatgaaaacgggtggatatcacatgatccaattgaaatttatgagaacacattgactgttgtaaaaagattaatagataaatcagcaattaataaaactgagattaagtgtattggaataagcaatcagcgtgaaacttcgcttatatgggataagaaaacaggatgtcctatagcggatgcaattgtctggcagtgttccagaagtcaagatatatgcgataatattaagaataccggaatgtcggaagttatttggcaaaaaaccggacttaggctttctccgtattttccggcttcaaaatttacctggcttcttaaaaatgttgctgcggcgcaggaaaaagcagaaagacatgagctgtgtttcggtactattgacacatggctgatatataaactgaccggcggcagagaatataaaacagattattcaaacgcgtcaagaacccagttgtttgatatattcaaacttgagtgggatgatgaaatatgtaagatgtttgggattaacaaaattgatttacctgaagtctgcgattctgacagcaattttggcgtaactgattttgagggttatttagaacagccgatacctattcatggagtattgggtgattcacacggcgcattgtttggccatggttgtttgaaaaaggggatggttaagactacatatggaacaggcgcttcggttatgatgaatataggtgaagttccggttttaaaccaaaatgtggttacctctcttgcatggaagatagacggtaaagtcaattatgtttatgagggcaatataaattatgcaggtgcggttatttcgtggctcaaggatgatgtgaagcttataaagtcatcagctgagactgaaaacttgtgcaatttggctgttaaagatgatgatttatattttgtaccgtcattttcaggtgttggggctccttactggaacagtaaggctaaagccgtactgaccgggattacaagaacaacaggcaaagctgagattgtacgcgccggaattgagtgtatagcataccaaatagcagatgtaattgatattatgagaagagagaccaggataaaagaactaagagttgacggaggcccttctaagaatcaatatcttatgcagtttcagagcaatatattaaacattaatattatggttcctgaagcggaggagttttccggtataggagcagcatatgctgcaggactgggcatgggtatatatggccttgaaatatatgataataataaaaataagaaatataaaagcaatatgaatcaaaaaaagagagaacaaaaacaaaatggctggagaaattcagtgaaaagtgtgctttgccaaactaataacggagggtaaaaatgagtggtttgcagatagtagagaagtataatatttttgagaaaagtatcataggacctaagacaggaaacccatttgttgatgtgaacttttcagttagatttataaacgggcatgtaacaaaagaaattgaagggttttatgacggcgacggtgtttatatcgttagatttatgccagagtttgaaggaacatgggagtataagacaatcagcaatgttaaggaacttaataaaataagcggtgaatttaagtgtatttcagcatcacagggtaaccatggtccggtgagagtaaaaaatatatatcattttgcttatgatgacggtgaacattattttccatttggaactacctgctatgcctggatacaccagaacgaaggacttaaaaaggaaacgctacaatcgcttgctaattcatgttttaataaagttcgtatgtgcgtatttcctaaatactattctaataatagggtggagcctgagttttatccatttgaaggggaaataggagactgggattttgagaggtttaatccaaagtttttcaggaatcttgaaaacgaaattaaaaagcttatggatatgggaatagaagccgacctaatattatttcatccttatgataaaggccattggggatttgaccagatgagcagggaaacagatataaggtatttacattatgtaatagccagacttgcggcttataaaaatatttggtggtcaatggctaatgaatatgattatatgaaattaaaatcaaaagaaaattgggatgagtatattgagcttgtctcaaaacttgaccaatataatcatctcttatcaatacatcaggcggatatactgtatgattattggaaatcaaatatcacacatgccagtgtacaaatcggttatgtgcctgataaaatgccattggggactggttttttcagaatgctcagagacgcttaccgcaaacctgtaatttatgatgagatagggtacgagggcaacttgccgcaaaggtggggaaaactcacagccgagcaattagttgataagttttggaaagctgtaacttcaggtacatatgcaacgcatggagagacttttcaggacccaaatgaaataatatggtgggcaaaaggcggcaagttaaaaggagaaagcgctgctagaatagagtttttgaaaagtattgttgaagaaagcggtttatatggtttagaaccgcttgacagttggtggatattaaacggcgtagggagaaacggggattattatctatattattttggagatgaagagcttgatgaatggaaatttgagcttcccggatttaaaatggatgctgaagttccaatcggtacaaagtttaaagtagatataattgatacatggaatatgacggtaactccggcgcctgatatatatgaagttactgataaggataaatataactgcatctgtagaattaacccggttgtaaaacttcccggaagaaaaatgatggcgctgcgtatcaaaaaaattggcggtgagtaaatgttgaaagaaattttatttggctgtgaaaggtataaaaataaaactataaattgcttgggtgacagcattacgtcagattattcagacgataactcaagctgggtggaaatgcttcacagggcattgccggttaaaaaaataaataactatggtattgcaggaacaacggtcgctgatgatggcattcggaacgattgttttgcaaaaagatttttagatatggataaaacggcggatgtgataattgtttttggtggtataaacgattttaaccgttctattctgctgggtgatataagcagttcaagaattacggagttttacggagcgcttaaagttgtttgccgtggtctgatagaaatgtatcctgaggctgacatattttttataactccaatgcacgcgtttggctttaaggattatcctcactggaatacaaagaatgaggcaggaaaaatattaaaggattacagaaatgcgattattgatgtttgcgaatattacagcatacctgttttagatttatattctgtaagcggaataactccggacgttcctgaaaacaaagagattatgcttccagacggtttgcatcccagtaaaaacggacgaataaaaatagcaagaaaaattataaattttttattatatacgctataaattaaaaggagggtatgagaatgaaaaaaagaagtataaacataattttttcgttaattgttatgatgacgcttttatgtaacactttgccggcatatgtttttgcagaaaatatcagtgatacacaaagtgagtcaaaacaaaatggtataacagaggataaaaaagaagtttcagaaacaaagagtgataatgcaacagaactaaattatatgattgatgaaaacggtgatagggttgagcttacagatgagataagggacactatttacaatgatgaaaaatcagaagaaactataagttcggaagaacaaaacactggaatttatgaagctgatgcaaatgaattttttgaatatgatgaagatgacgttactgttgctgctgaaaactacataatggatgaaagttttgatagttacaatgttggtgatacggaacttcagggctgggctatcaggcatatatctaaaaacggaaacagtcaaaattcgactattcagattgaaagcactgataaaggcaatgcgcttaaatttactaaaaaagtaaatgaagctatgaatgatacattcccgtcaagtgacgaggctttgtttgcagcatatgatttatcagctccggttatcggagatgtgactgtttcggccgatatatttgtagaacaggccggaaggttgggaatgtttgtatatggaccgtgtgatagtatagatgatgcgattaacagaacatcggataaggttccttatctgaccagaacttattttttcgataataatactacaacaaacactaaagatccggcaaccgtaggaccgaatggctttacggtgtggagcaacggtgaaaagctttcaaataaaaaagaggcttggcatatcggtgaatggtataatgttaaatacgatatagatacagaaagcggtacatgtgatttaacaataattgatgaaagcggaaaagttataaaatcagaaaataatatactgcttacgcaatctgttcttgagacgggcggatatattcaaggcgtaggttttacaataatgaacgatacgaagtgtctcggggcatattatgtaaaaaatgtaaaggttatagaaaatattgaagattctgtcaaaaatgtagtaactgataaaaattcactctcacttcctgttgatgcagagaacgttacagaaaactttactcttcctgtcaaaggtgagcatggttcagatattaagtggacatcatcggatgaaagtattatttctattaatgaaaagggtgaagtctctgtaaaaagaccatcttattcaggcgttttatcagtaactgttacgttatctgctcatttaactaatggtacagctcaggctgataaagattttatagtaaaagttttagaagaacaacctaggtcggatgctgataaggttttggccgataaagagaaattggatttacctaacaatataaatgcttcaaatgttgaaaacaatttcttaatgcctataaaaggaaactatggaagcagcatttcttatgaatcttctgataatggaattttaaatatagataatagtaccggaacaataactattaataagccttcgttttccggacagggttaccgtgctattgttctaacagcaactattaaaagcggaagtataacagatactaaatcatttaatttaagtataaaggaaaaagctccggaaacagatagtgataaagctctatgtgatgtaaataatgcaattattggtggtattgacttaaacaatgttcgtcagagcagtttttacttaaacgataaaggcgaatacggaacattaacatggacctcctcaaattcaaaatatgtatcaattgaaagaaatatgacagagaatgatgacggtaatgttataagcggcgagggttataaagcggttgttacaagacctctcagaaatcaaaataatgttaatgtcacattaactgttaagtcaactgtaaatggtaaaacggaaagtaaagattttgaactaacaattatagctgaggattctttaaaagcatttcccggtgtagaaggatatggttcatattctgttggaggccgaggcgggcaggtatatcatgtaacaacattatctcattatggtccgggctcattaacatacggagttgaggaagtaaagggcgcaagaacaatagtatttgatgttggaggagtaatagatttaaccccgctcggaagaccaataaggataaaaaatgaggaatattcaaatgttactgtcgcgggacagactgctccatatcctggaatcacgttaaaaggctatggctttgaagtcagcaatactcatgatgttatagtaagaaatttaagagccagacccggagatattatggaagacagcgaaacttatcaggcggatcctatgagtataaaggcgtctcagaacgtagttattgaccactgtacaatggaatgggcaattgatatgagttttcgtgctacaggagattatattacaatctctaactgtatgatgggcaagggactgactgcaaactctccgcatgaaaaaggcggacattcatatgctggaatgattaatgagggtgctagaaaagtgacctatgcaaaaaattatttaagtgacagtaatcagcgtacacctcgtattactgacggagaatgcttagaggcttataataaccttctttataactgtcagagcggttttgatatatttaataatgagtggcaggataagaattcaaaaatgaatatatataataactacgcacgtatgggaccgactaataataacaagtatccatatagagggaaccgttcaaattatgcaggcggggttatggtatatttcaccggaaattatacagaaaacgcttctaataaaccaactgctgttagccatgtaagcaattatcaagacaaaggcggcacctctgatccttttgaatatgtattaaaattcggacaggataatggaaaacaaggtacaaattatgatttaagcaatgttactcttgacgaatggaacagcaatcccgcctcatatgataataaagataaatcagcgcacgctgcaactcttactcatatggattatccgtttccggctccgcgcggagatgtgctcagcgctgtaggcgaagacggtactcttaacctggttgaatatgcgcttgaagacaacggtatgggagtaacgagaccaacccgtgatctttacgacacaatgcttttacgtgagatggaacttggaggaagttataacagtaaaaatctttattcacttaaagcggatcttagtgaagaaacaatatcttcatattttgataagctgcaggcaaggacaaatatagattactcaccatataagacggcaagaacatggtatgtgaaacaaggtgacgggccaactttaaaaggtgcgaataaagcagccggtaaaactaagcctgtacactgggatgattatactgatgtaaatataaatacaaaccctgatgcaaaagataaatatgatgaacattatatttatgattttgaggtaggaaactggtggggagaatattgcggagctcccggcatgactactgtatacactctatatgatgaaaaactgggacgcgttgttcaaacatcagatccgaactatgacccaataagatattcgttaataaatcaagatgaaggttatattgcggtaaatagaactgttgcagatttattcccggctgattggatgtatgagcaggcgcctgaagcggctgaagctatgaacagctacagaaaccgtaattatccttacagcggaaatagtaatgaagcgggaaaagatactaaatatacatctaaaaaaattgcatgggatggtatgggtgacggaattcctaactggtataaagaatacagggggtggagcaaaaaccgttatatgtccagtgaagtgaattcagatactggatatacatatcttgaggaatatctgcagtttatggctggagacgaacctaatgaatcggatagtatgccggcctcaattgagaattttaagtataataatttaggttattctacagttcagcttttttggaacactacgtatcgaacaacttgtgtgcttgaatacggaacggaaccgggtgtttatacaaacagcgagattttgacatatgatattatatcggattattatcatacttatcatgcaaaaactattgttgatttgaaaccggatactagatattattacaaagtaaccgctactgatgaaaatagtaatgttacagttgcagaatacgatccaaatgatgaacataagaaaaatatgacttttactactgaaaaatcacccaccggaggttcaatagcgccgtctgagccaaatgtaacaaaaactgttccttatttgaatcaggtaaggcttaactggaccggcgatgtgaagactgatgagagctatgagatttattatgatacaaacgatcatggcacagattatatggcatatttaaataaggttacagggttagacgccaggacaaataaacagattattacaaatcttgaaaatggcaagaagtattattttgttgtagttgcatcaaactcagccggaaaaactccgtccaaagttgtttcagcaacgccgtcaggtgttctgtttgactatcagtttgggaaaatgacggatgaagagagaaagaattatatgaacagccaatatatttatactttgggcggtaatgtaacaatgcagaaggacccggatacaaacgaatatgttatgcagttcttagattctacaggttctcacggtgttaacagcgatgttaaattcccggtgacgcagactgaaaagtttagttatgaagtaacattaaaattgctttaccaaaagccgtctaatattcttaattttatgcagccaaatcaagcgattaatatagatgagatgaatacattccaaattaatttctttaaagatgcttcaatgactgaggatagagattcatccaattcggcatggtgggattcagcgttttcaattctttttgaatcagaaactattccgaaatctaaaaatgaggatggaagaattgatggttcggatcaaaaaggtaatttaactttcgggtcgtcaacaataggctcatataatatagggcgaacgccatcagaaaatgacaacaaaaagtgtgttcttcctgattcaacaggagtaaaaattgatagtacgctagttgactttaaatatctcactccatatggcgacgcctattattcaagcactacggcaaagacccttcatggaaaatggtattatgaactcggttcagcagagtttgtgacatatcgaatagttgtagacccgccggctcagcaagtaaaagtttatgttgacggaaagccgatttatagctctgatagtacagatatagaagatatgcaaaaattatcaaatataggaagggttcagctcaagtcacgtaatgacggctattcatgggtaaatgttgctaggattaaagcattcagcggagatggaaatacagacattattatagataaggtaccatctggtacggtaagtagtacaggaggaggcggaggcagtggctcagattattcaccgacatcaactccaaatgcagtatcatccgcttctcctgaaccgacagtatatccaactccatctgttaatgaatcaaacagatattttgatgatttgacgaattcagaatgggcaatatcagcaataaacgcgttagccgaattggatataataaatggaactgaagacagaatgttttctcctaatatgaatgttactagagctgagtttgtaaccatgcttatgcgtgcttttggaagcgaggctgaaagagcggatgttcagtttaatgatgtaattccaggtgagtggtactatgattcaatttgtaaggctgttaaaataggaattgtaaacggatatgataccggcatgtttggggtaaatgatttgataacaagagaagatatgatggtgatgtcttataggcttatgaattcatttggtataattatacctgaaaatagagtgtataaaaagttcagtgatgaattaaatataagttactatgctaaggaagcggtacaaaaaatgtattgtgcagaaataattaacggaattggggacaatatgcttaatccaaaaggtgcggctgaacgtgctcaagctgcaaaagtaatatatggattactatgtatggagggaactttaaatgaataatttttgtagaaatttatcaatattattagcgtttgcaatcattttaggaacgtcttcgctaacagtgtttggtgaaaacagctcggcagcaaaacaagatgctgccgagtcggttgtgagttctgcggccgcctcattaatggcatctatgccggacaacaatgttcaatattcagaggattataaatttgattattctttggggctgtttgaacttttagatgatgacttttggaagacagaacaggtgacaagagctgattttgcagtgattgtggcaaaaatgctgaaaacaaatacagacggatatcctaaatataatagaacaccgtattcagacattgataatactaactatgcatatccggcaatctgttaccttacagaagtaggaatattaagcggagacggaaactcagaatttagacctaatgattcaatattagtgaatgaagcttcaaaaatgattatgtgtgcattgggttacggaactgcttgcgaggaaacaaaaggcggatttcctgacggatatacaacatttgcgctgcagcagggaatttataatggaatagatgtaaattatacaagcacattgtctgctatgcagatgtcaagaatggtaagaaacgcaatggaagcgtatctcatggaaaacattgtttataatacagatggttctttaagtttatcaatcagtgaaacaaaaacactgctatcagaaatatataaaatatatactgcaaccggttatgttacagggacatatttttcacagcttggtgatacatcagtagatttggaaaatgaagttgtaataagcgatgtgtatgttacgaaaggcagcaatagcgaacattttgaaaatatgatttatcaaacagcagacggaattgatatggaatctattttaggttatgaggttaatatttattttatggaggatgtctcaggttatagaagaaattatatttcatattgtgaacctcgtaagagtgttaatgagaaacatattattccggcagacaatattattgagtttaccaatgaaaaaatagtgtatactgataaaaatgataaggagcggacatttaattttaaagacggttatactttagcatctaagaatggcgctccggttaattctgttaatcctcctaaagaaggaagcgtcagtattgtaactcataacatcaattcaaatgttaaagctgttatagttgaagatgtaaaggatgctttggttgacagatatagtgaaaatatggaaaccatagtttttcagtcatcaacaaaacttgataacagtgataagaaaattgaattaaaatctgattctcatattaagttcactttaaatggaaatataattaaacctgaagagttgctaaaaaatgatgcggtaacatttacaaagagtgaagacggaaaatatattagaggatgtgtttcaagggatgtgctctctgatacagtttcaaaatatgttactgaaaaaagcgcttccggaacagaaagaaatattgtaacaattggagacaaagactatccggtgtcaatgtattttgataaaataatatcagctggatttacaagtgattttcagattacatacgacgggaggattatagggacaaattcttcagtttctaatgggggcaattatggttatcttataaaatttggagattttggaaacgcttttgatagttcatttagagtgaaaattttggaaaagagcggtaaagtttcggagtacacatcagctgctaaaattaatacaaatgttgatggtgagacaaagcaaagaaccgcttctgaaattgttaagaactactcagagtattttgcagatgcacagcttgttgtatatgaaacaaattcagccggtgaaataagaacattatataaagctgaggattttacaaatagtttatcggatccggatgatttggattttggcaaatattttaccggttctacaagatatataaacaatctgatgtcgaattgtgctattactgatgcaacaataatttttagagttcctcttatagaccgtgacagaaatgaagattatcaggtaaagacaaaagatgatttaagcgaaggcgtatatgatgctgatatttatgatatcagaaaaggtattgctaatgttgttgtaattaaggataaacagcctaacagtctttcaaatacagcagatactctaattgttgataagctttcacaagcgtgggatgaagagaaacaacaatctgttttagaagtatcgggatggtcaaaaggagaaatgatttctttgaaagttgacgaagattgttcacaggctgattcatatactgaggaatattacgagaataaatctgttaaagacctggtaagaggtgatgttatacaatataataaaggttctaacggttatgtgtatacatacaggatgctgtttaattttgataagagatattacaataaggactactttgaggtaaatcaggacggcgaggaaaacgcagtaacttcaaatgatgctcttgacacattatttggtcatgttcaacgcgcatatgatttctttatggttgaaacaactaaaccagatgaaaaacagtggtacagatcgtatccgacgacaaatataaatctttatgtgtatgatgttaaaaaagatgaaattactattggcgaatcatatgatgtagaagccggagatgatgtatttataagaacaaaatatgataacgaacagattgatatgcttatatttaagcaataacagttaaaattaaaaaattaaagcggtaagtataaattgcttaccgttttgattatttatagaaataaaatcttgtaaaaaagaaaattctaaagatgttaaaatataattcaaaaaggatgggacaaatggctattgtaaatattttagaaaattttaatcctgagacaaatgctgtttttgttgaaaaggcagaaagtcttagaccaaaacttataaaaactaagacgaaacctatctctatagttgaaatatataaaggaaaaaatgattgggagtgtaataagataggagaaatagacgagctgtccggatttcatcttggaaagagtgataaggtatgtgtagatttcggcggacatagagtaggctatgttcgaattaaactgtcatatgtcggaagtccgcctgacgctcctgcctatattcgtgttaaacttggtgagcatttgtgtgaaattggtgaagagacttcggattataatggaataatcagttcaagctggcttcaggaggagtttctccacattgatattttgcctgcggatattcgtatgccgaggaggtacgctttcagatatttagagatattggttaaagatacttctccgaagtttaaaattgtgattgacagcattgaatgcaaagctgtttcctcagtagatttaggaactgtaaagccgttaaaaggagaagatactgaattaaatcagattgatagtattgcggttaagactttagctgactgtatgcagagcgtatttgaagacggaccgaagcgtgaccggcgtttgtggataggcgacttgcgtcttcaggcgcttgcaaattatgaaacatttaataattatgatttagtgaaaagatgcttatatttatttgcgggattaaaacaaaacagaggcagagttggttcatgtttatatttagaacctgagccgcatgttgacgatacggttctttttgactattctttattttttatatcatgtttgcatgactactatttttccgcattggatatccaaactctcgaagagttatgggatactgcatacaggcagattgaactttcactggagcggttagatagtagggacgttgttcgtgacagcaacgcttggtggtgctttatagattggcctgatgaactgaataaacaggctggagctcaggcagtttttatatatactttaaagcaggcaaaaagaattgcaaaagaattaaaagacaaagaaagatttgcagtgatagattctcttctcaatagacttattatcggtgcggtggaaaatctttgggatgaagaattaggtttttttacgagcggaaaggataaacaaatttcatgggcgtcacaggtatggtttattttggctgaagtgtttgataaagaaaaaaataaagaattaatagaacatcttatttctaaaaatccgaacgtaaaaatggttactccatatatgtatcattattttatagaggctttaattcaatgtggaatgcaagacgaggcagaagaatatataaaaagttattggggaggaatggtaaaggacggtgcggattgcttttacgaattatatgaccctgaaaataaagatgtgtcaccatatggctcacgaagtataaatagttattgtcatgcttggagctgcacgccaacatattttataagaaaatatctatattattctgataattgaaacaaaataagaatagtgtttactgatatattgcttaattataaaaaataatataaattttatattgtaaaggattagaatttatagtataatctgactatgtggtataatttaaaactattattgttggaggtattggaatgaaacaaagatttaataaagtcttatgtttaatatttgtatttgcattaatgtcctttgcaattcttaatgtgtcggcagcaggagatacacttgctttcccgggggcagaaggcggcgggaagtattcacttggagcacgcggaaacgatagtattgaagtgtatcatgttacaaatcttgacgcttcaggtgaagggtcatttgttgacgcagtttcaaagccgggcagaataattgtttttgatgtcggcggagttattgaggtatcaggcgatatacggattaagagcagcaatttaaccatacttgggcaaacagctccgggtgacggtataacaattgtcggcggcagtgtgactttagacgccggtgtacatgatgttattataagatttattaaggtcagacctaccgataaaaatggcggtgaatttgatggaattggcggacgaaataataagaatattatttttgaccatataagtacatcttggtgtattgacgaacttttaactctctatgccggtaatcgtgattatgaaaatcctggcggcgagggcaatcatttaacagcacaatacactcttgcttcagaaagcctgcgtatgagcaatcatattaagggagctcatggttatggagctattataggaggcacaaaagctacttatataaataatttatttgcgcatcacgacagccgcagtccgagacttgacagacagcttgaggggacggaggtcagcaataatataatttataactggggacagacaaactcagcatatggtgcagagccgtatgatgcaaatatattaacttccaaaattccatgcagtattaactggataggaaattattataaattcggtccttcaacacgtgaaagtttgaaatacagaatttttgatgttcaaagtccaagagcagacggagaccctaaatcgcagttttatttgtcaggaaattatgtaagcggaagtacaacaataacaaatgacaataagttagggcttaataatgcagcaggagcagatcttcttaatgaaccggttgatatgggtgaatattcatatgagcctgtttcagcagcggaagcctatgaacgaattctagacaatgttggtgccgttttgcctaagcgtgacgcgattgatgcaagaataataaatgatgttaaatatggcacggggcgtgttattaataatgcttcagaagttggcggacttataaaacctcagaaaacattccgtcaatttatgataccagaggaatggctgatagaaaatggtctttctgataaaaaagacaatgatataattgaaagcggtaaatatgcagggtacactgttattgaggcttatgtggatgaatttacagctgaacatcttaaaatacatccaacaaatcccgaaattgttgttcagtcaccggctattgcttctcttgaaaatagtatcaaggggcttagcgtagacaacagtaaatggacagttgttaaagaaggagaaacagtaagttataaagcgtcagcatttcctgttggagatactcaaattgtcaagtgtgagatttatgatggaaatatacttatatctcagtttgattctgatagaatagatacagagttatctcttgacgcaggtacacattatcttacttcaagagcatataacaataaagatgaggcaacccagagcacaacttcaattgtgtatgtgacgccaactgaggaaccgggaagttataagacagccgaaatcggttcatgtacatataagggcaaaggcggagcttcaatggacaaaaatggtgtttataccattttcggcagcggtaaaataatgacagaaaaggagttgggttcaagtaccagtgcagctgattcatgtgaatttatgtataagaaagttagcggagactttgatataacagttcgcgttgaacagattccaaagtttgaaaatcttcagctaaatggcttaatggttcgggcgtcacttgattctaatgatatgtttgcaatgattggcgacggctgggcaaaatatggtgaaaacgttaagattataacgcgcaaatttaaaaatgctgcaaagagttttgaatacttcaagaatgaaagcggtcaggattgtgataatgaaaaagccggttattctgctcctaaatatatgcgtattcaaaggagcggcaacagtttaatattcagtgtttcaaattcaggtaaagattggacagataatggaagacttccgcaaactgttatattcgattcgcttcctgatacattatatgtcggtttggcaacagatactgcgtcgggggtatctgtaaaggaatatttttcaatggcaaagttcagcagactaactttaaacggtgtgagtgacgttgaggtaaaagaaggcgctgtaccattttatgatgctgattttgacagcggcgaatggtatgttccaaagggtgcagaaattaatgattatagcaataataatataaacggaaactatggcactattcttatgaattggtcctcagaggaggcggtgcgcagttttaatcctcaaagtgaaggtgaaattaacatttcggcggatttttgctttgaaaaatataaaagtgactctgtaaacgaaaaggctggttatagattctcacttaaaggtgagggaagcgatggcgagactaaaaatttgattacttcttatgctcaaatgacacatggcttttatataaattatatcggcgaaaaggatgctaacggcaacgaaaattcaattccggatattgctccggagtcaagcaaaacatccgaatttaacacatggtataaaattatggcttcacttgattatacaacaggcaagggaaagattacatattttccttataccgaatataattctttaagcgggacctataatcttggggacgccgtatttgaatatgaatttgaatttgatacaacaataaagctttcaagcataagctttcagcgtcttggtggatatagaacatatatcgacaatgtcagcgtatctatgagagaactaatgtatttagacagcggcaaactcgttgtcgatagaccgtttgaagacgcagaattatggattgcggaatacaatcttgacggatcactaaaaaacagcacaaattatagcataaataaaggtgagactaaggaatatgatattccaagcggcgagaaatccaaagcgtttctttggaatgaaagtcaagtcccattgtgtggtgaactgcgaataaattaatactataacatattattgtattgattatatatcagaattatctttaaattatgagcaaacattacagcattttttatagtttacggtgaattcggagttcagacggcgtaagaagcgcggttatgaatgatggaaaagaaaacaaatatgagttaaatgaaaagatgagtgtaaagtacttacgcaggaaatgcaaaaacaataaatatatggtaattttgaagttaatctgtatggtattcgtcttggaaaaaatatatcattaaatttttaaattaaaaaatataaaaattaattacttcagataaatataaaaagtcagaattgaaccttcatggttcaaattctgactttgttttaacaaaaaatataattaaaatcctacattattttaaacagcagatttatcaaaacacaaaaatataacataaacgtaatgatttaagttggataagaattttataaacttttgatagaattatatcctgaatttataacaatatattattttatatgcttgagatgtaaaaaattataattttattattgcaaaatatacaaattagtattataataaaagcatatatgtggtaataatgaaaattaattaataaggagagttgactatggaaaatttattaaaaaggactgtaagttttgcagttgcttgcgttatggtattttgtatattaccaatggcaggagtatttgcggcagagggtgaatatgaggttggtgttctttatgattcggatttaggtgcggtagaagtttcaaccggtcagtcgaatgcaaatcttgaggcggttaccgattggtctgttaattcgtcaacacccacaaaggccggttctgtgtatattgatgacaataatttaaatgtgtcatccgtgtttaatactactttgaagtctgcaaagtataatataaacggagtaaattatacacattatattcagattaggcttgacagtgctccggccggcagcgatttggctgaaaaagccggttctactgcattagtgataaaggcaaataaaagcggtacgctaacatatgcttacagacgtcagattgcaaatggcgaatataattcaggcgatggtaaggatcttaaaatttctaagaaaaatgccgatggaacttatactccgatgactggtaaaataaccgtgttcagtgatgacggcagttttggattgtgtaatcaatctatagagctcacagcaggtgatgaatatattatgtgggcggtaggtacaaccggcacgctatgtggtatgaattttaacgagaagcaaatatataatgcaagaccgggtgatatggtaactgttaagtcaactccaaataataatgcatggattgggaatatttcacttgatgattctgatatttcactaaatataaatagtgattacacagagtgcagttttgtaatgccggagaagaatgttgatgtaagcgttgattttataaataagtcagttcagaatgaaaccgacggaatcacttttaatatgattaaaggcgttaatacaactgaaaataatattactgatgatttggatttgatttcaggttttggtttttcaattggatatgcagatgtagcgtgggagtcatcaaatcccgatgtaatatcgattagtggtgatgttaatactgataaggataatcacgatgtcaaaatgacagctgtttgtacatttcaggattatccaaacttgagaattactaaagattttaatttaaaagttcctgctgatacagatgataagggcgcagtagccgttgcgaaagaagcgcttaatataggcgatactagtatggttaagtcaaatattgaattacctgctaaaggcagacgcggaacaacaatcacttggataagcagcaatcctaacgtcgtttcagcagatggcgttgtaaatcgtcaaaaaggaactgacagtaaagtcgtattgacagcaacaatttcaagaggagaggcaaaagatacaaaggaaatagaagtgtttgtaccgggttatactgctgtagaaattagcagggttgccatttcaaacgctgagggccgagttgttatgtctcctatggacggtggatatgtaagtcatattgtatatactgacagtatttctgaagcagacagaaccggtgaagaaacactgcttgttgcggtatatgataagagtaatgatggagcgcttacagcatgtaagttgtttaacttaaaggaaacgactgagaaagcaggcgaagagacaatactctatctgaatccggaagatgtgccggtcgacagtaattcggaaataaaagtgtttgcttttgaaagcacaaattctgttgaacctttaatgaaatcgccttatacatatggtcagacagttgctaataatgctactatatttgttgccggtgattctacagcatgtaattataaaacatccggcgaaaaaaatgattttccaagaaccggatgggctcaggttttaggtaactttttcacagatggagttacggttaaaaatttggcgctcagcggcagaagttctttaagtttcagaagtgatgctaattataaaacaataattaatggtatgaagccgggtgattatttcataattcagtttggtcataatgatgaaaagtctgaggcagatagacataccgattataaaggagatagatttaccgacggctcatacaaaaattctctatatgaatattatgtaaagcctgcacttgaaaaaggcgcctatccgcttataaccacatcaataagccggaataaactaagtgatgcagggcatgaggcatatgtaaatgcggcaaaagatttagctcaggaactgggactgccgtacattgacttatatgccaaaacaaataaatatataaatgatgttggaactgagaaatcaaaagatatatttgcgtttataaataataatgattctagatttgtaaaaggagcttcacttccggaatcatttaagaattcactgggaaagagtacaattgatcagattggtgattttgcaaattcacagtataaatccggaggttcagataacacacatattcaatattacggtgcgcagatgatatcacaatggtggtgtgacgagattgaaacgataggtcatccgctgacaggcaagcgttcaatacacgttatgactattgaggacttattgccatttgcaggtgctaataagtaagacgataatataatttgtgttacaagaagtataatatggattataaagttgtcaaaaatgtatgcgcagtgtaaaaaagtgacaatggtaaaccataatttttaataatatactgacatcggtattacatcggtgtcagttttattttaactgtatgtttttggatataagaatagttatactcatcaataatttctatggtgttaattttattataaaattttttttaataccgtgaagaatttttttgatattgttatattataattttttgattgtcaataaaataacctgtcgagaattaataacatttgtaaatcgtgttatgtggtttttattatatccgaactgtttacatatcttgtcctggttttgtggtttttgcgatacaattatttataaataattttttgactaaaactttagttatattttttcttttgaggattctttcttactgcacgccgcttttattgttctgtttaattaaatatttaaatcaaagtttaaagcggtcaatattatttattttttgattttgacaatatatttaaacgtttataaaatgagatataaaaaaagattatatgacgccaattaataaaaatagttatattttttatagttggtaaaataaatgtacgtgataaatattttattaatatgtaagtgatatcattataagttctgcttagaaaataaaaaataattaaaaactattgcaaatataaattaaatatgctataatattttttgttgtgcataactgagataataataaatatgttctaatggacataagctaaaattattttgtttatgcagtaagttaaatatacagcatatggacaggtatcgaagtggtcataacggggctgactcgaaatcagtttgtcggtaactccggcacgtgggttcgaatcccaccctgtccgccaaatgcacaaaaaacgccgtatttacggcggttttgttttatcttacatgatttttacacgattttgtttaaaatatctactgctcgctcttcttccttggggtataggtgggaatatgtataccatgtcatattgacatctgtatggcctaagcgccgggcaatctcctgtatatttatgccttcgttttctaacagcgaggcgtggctatgccggaaatcatgatccttatggtttttagtcctgctgatttggcaagctgttcgttcatttttgctaaactggtatctctgagcggacgtgtgaccccgcaaatcctgaaattgtcgttgaatcctttatactcagaccagcgttttttatgctcttctaagattttaattaatggtataggaagttgaagtgtgcgaatcgagcttttattcttaggagcagtttctctgtctttgccccttagtttttgcgatatgctgcgtgttacgttcagatattttctgtcaatatcagtccattttaaagcgtgaattttgccttttttaagtccggtataaaatgcgatagaagaaagaatacataaaaatcccagccattcaaatttgaacaagtttcagcgtgttcaagtgcagatttggtgtatagtttatattcgtccactgtgtaaaagtccatttccttttttgttttccgtttttcgactccttcattttgtatattggcatttttcacctttcttacattcgtgatacttttttatccatgcgcttatgtggatggtgaggcctgtttgttgcaaaaattgcaacaacccattgttttaacttgtcatgcagagtaattcaacgcacccaggcggacacaccattacatcatatcaatatggcggcgataacgtcttggtatatcaataccaaccatataaccgatttcgtttaacgctaatggtatgatagaaaattcgtctttttaaaatctttggatacgttttgatttattggacatattttcataattacttgaacatacaaagatccaattagcaccgtctttatttactacaagtctaaaatatttgtctaagtctatatcttcaaattttgctaaacgtaataatataagatgtttggataggctacaaaaaactggataaaaaaataaggtcatgtaaaatagaaaatataaaaggagaaactatgatgaccaaaagaagaaagccctgatcctatacggatgaattcaaacaacagttagttcagctataccataatggaaaaccaaaatgtgatatctgccgtaaatatgatatagccacttcattgctggataaatggttgaagcagtcagcagctagcggcttttttcacgaaaaagataaccgttctgcagaagagcaggaaataataggactgcgcaaacttaaccggcaattgaagatatgatgtttaaacaaaatgatgttattgacaatcttaaagatgatttaattgaaaaaatggatgcaagtcaaaaatgaattattggtattacaattgcaagtattttgggtatcgctgctatggtaataggtgttttgattgcgtagtaattctattgttaataatattagaaaattaaataatataaaagatgggttttaatggtattgacagaaagatggcagacacaaaaagtgcctaccatcttttttattcacttatcatctaaatacttttttattgatctccgaataaattcagctttagaaataatattatcacctttaaattttagttcaaactgttcaattaaatttttatctaaatcaacagatattcacttataattttttgtattatatcgttgttttaattgccacgatatgttgttttgttattgtatataactaaaatttacttgtaattaatttcctaaaaaaataaaaaatatgcaaaatcttgttgacaagtgaaatgcgttatggtaaattttacctatacggtatttagtgtatgtttgtactgtgtggtagtgtatatatcacgatagcaaataaaatatataaaaataaataacaaataaggaggaaaagttatgttaaaaaaagtgacagcatcaattcttgcagcagttatgctgtgctgtggttttgtatttgttggttctgcggaagaaaattatgcagatcagattgcagagtatttctcagatgacccaatggtgattaggagtaaatattctgatacagcggtgggagaaaatgtgagcatggtggagtgtggaaacaaggtatattgttttggctggaattctactcaaatatatgatactgcagcaaataactggacaagcgcgccggttatgccttcattgagatcagaatattcagcagttgaaaatggaggaaagatatatttaattggtggtattattggaaacgaagtaactgataaagtagatatatttgacactgagaccggtacttggtctgtggggcaagagattccgtttggatttgttgatggggaagcggtatctataggtgacaatatatactgctttggtggatataatgatgttaatcatagtgcaaaatcaaaagatacatatatatatgatacagtaaatcaaaactggtcttatgatggttatcttcctaatgaaggagcgtatacgggagtcgctgtaggaaataaaatatattgtacaccaaaatacagtggagacggcaattatacatacgtatatgatacaagtaataatgtatggtcagagcggcagatacgcccaagctatagttacggttctgtttcgaatcaagaaggaaagctgatgaagctgggcgagtttttaatctttattaattatggctcagacagcggcagcaaggtgagatacgcatatatgacggataaagatatatgggtggtgctgccggatacattgccggaaatggatttgccggcaggaagaacagcgataataggagacaggatatatacaataaaagatagtatgcatgatggggtaatgcagggaagactggaaataacatacatatacagtaatcaaaaaatatatacaaacagaaataacgtagcagtgggacaaagacatatacttgtgtataaagacggggtattgatgtctaagggtaacaatgattatggtcagttaggaaacggaagcactgcggagtctgatgattttgtggcagtcaatacgccgtggacagaaaagggcgaggcggtaatgagcgtagccgcatcgggaaatatgagttacgtaataacggacaaatataatctttatggctggggacagaatgcaaacagccagctaggaaacggaagtatggaaaatgttctgacgcctgaattgctggcagaaaacgtggttgatgttgacgcaggtgaagcgcatacaattatcttaaagagagacgcaacggtttgggtgagcggaaataatacttatggccagctcggcaacaattcaacaagtacgaagagacgttttgcaaaagtgtatgaaggagcgtcagccatagccgcaggagattatcagagttatataatagacagtgagagaaaattgtattcgtgcggaaagaacacatcgggacaactgggaatcaattcaacagaaagtatgaaaaaaacatacacatatgttatggacggtgtgacaaaggtaacggcaggtgcaaatcatgctgttgcagtaaaagaaaatggaactgtgtatagctggggaagtaacagttatggacagctgggacttgaattgacagttgaaaatgccatagcgcctgtacagtcaaataatttagtcggcacagaaagtataaaggcaggaggtaatctgacaagcttccttaacggcggatatttgtatcagtgcggttatatgggatggagtaaaaattatcttcctaaaaaagttatgtcagtcaccggtgtaaaagagtttgatgctgatgaattatgtattggtatggacagtgacaataatttatggcagtggggaatttccacatatgaccaaaaatatatggaaacaaatactgcactggagcctgttagaatcggaggactaaaaaatattgaaaaagtagatgcgaatcaggatcaggtattggcggttaatagtgacagaaatttgtttgtgtggggaagaggctggtttggaacaggcaagagcggagaggaagtatacggatatccgaaaaagagtgataaatatagcagtgctgacgagatagcaagaggtaaaaatcataatgttatcatttcagcggaagttgttgaaggatgggggagtaattctaacaaccaacttggaaagttcttgccgaagaacgtaatagaaaacagcagagttatagaattaagcggttatacagaagagggagataattataacgcgtcagattatcttgagaacgaaccgctcaaaatagcggcaggaaatgactttactttagtagttagaagacattgtattggatttgaaggatataatgctatatttgaaaagcagcttgtaggaataggcagaaattacttgggtcagcttggaacaggagaaagcagtgttagtgaaagtgaaccggttgtaattttgcagaaagatatagagactgtttcagcaggagatagttttgcggtagcaacaactgaggatggggaatatgaaagagatacttatgtatggggagcaaatgaatatggacagttgggacttggccatacagacacagtatatacgccgaccagattagaaaatccgcaggatgaggaagactggggagtatttaagcaagtatcggcaggcccggatttttgtgttggagtaacagaggccggaaatgtgtatacctggggaagaaacagtgcaggacagctggggcttggacataaacaaaatatgttaaaaccgacaagaatccgcggacttacaaatgtaagagaagtagtagcaggatataaccacgcactggcaataaaaaaagacggaacgttatggacctggggataccaaaatgacggacaacttggcagagcgctgggaaataaccgtgttccgggacaagttttgggaatcccggcaataaaaaaagcagcagcaggacgaggatatactgtagcggtagatgtggatggaaacgtatacacatttggcacaaatgaacgttcatctttgggactataccgaaacgtgcctgagaatatatatggaggaatcggagaggagccaaaaattaaaccgcttatgaccgccaaaagcgtagaaaatacagaggagggagaaaacaaatgagtagactaaaaagaataatatctgaattaataataatatcaataatgtttacatcaataccaatggtgtttgctgatgttgaaaaaaccaatgaatcatcagtatcagaagaacaagtaataaatgaagaaacagagaataatttaatagaagaaaatgctgatgaaaaggatgaagatattaagaatgaaacgctagataaaaacgaagaaatagaagacaaaaatgatgaatcagcatcggaacaggaagctgtcgaaacgccgtcgaccgagaaggaagaaggtgcattgcctgaagccgaggaaacagaggagccggaaacaacagttatacctgaagcaacagaaactcctatgcctgaaataaatttggaagaaacaataaataacggggttaaatattctgaactgagcgatgatgaaaaggcagaagcacagaaacaatacggaatacgtgatgatgtgttcgcagattgtgaaaatgaaggttttgacctgcaaaacactttggaattcggtgtgcttattcagaatgccggcataactgcaagtgaatataagataatgctcaataacttcgaaagtaaagaacaagtgtttgatgagcttgaatcatttgcaaatttcaaatattctgttccggctttaaaaatccaggaaaatgctgaatatagaagtcttttcataaacggactgacatctgaaaaagttttgcagacggcagcattatccgctatgcttggaatagccggcatagcttcatatgctgatatgagttatgaggagatagaaactaaactcacagaagaacagttcttggaatatagttcaatcatgtcttgcttaagtgaagtgatgcctatggaagatgaagatgaaacaatatatgatacatctaaataccctgacgcaccgtttacgtttgacagaaacaacaatgaaacctttaatgaatcctcaggagcattgggatataacttaagcggactgtcattgccgggtaaaaacggacttgatttaaacttaagcgcaagctataacactgcaaactcatctcccacagatataggcagccttccggcgacaactgtagggtggtataaatatgaaactccattagtaaactttgcggcaggatggagttttaacggtattagctctataaacctaataaacagaaagtatggttcgtcatatagaacagattcgatattgactgcttcagacggcagtacgcatacgatctcatacaaaagtctcagagattcttctgtaattgagttaacattggatggaagatatagctatgcagatttaaagttcgaaaaaaatacagaatatattgattctgacgggggagttgtctctgcctttaaattgtattacaaagatggaagaatagaatacttcgatgcagacggcaaagttatgaaaacccaaaatcgttttggtgacgctatatattatagatattatacaaacggtgatgaaataaatgatgattttacaaagctgggacaggaatataataaatgtgtgattacagatacatgcggcagacaggtaattgtagagagaaaaacaaaagaaaattatattcaagaaataacagtaaaagtgttaggaagcgatggttccgaaatagagggaaccactcaaaaatataatattaggtcaactatgaatacagccaatatggacacatatgcccaaatactggatagttacacaaatcaggagggattacaaacaacatttaaatatcaggaaggaaataatgaagatgaaatatatagcgtaacaaattttataaatagaaatttttatattttgactgatgttatccatccaacaggtgcgtcaacacattatgaatattcaaaaactatgtatagttataatagcttaagacaggaatcagcaaggctcattaaacgttatgatgttgttaacgggatagaagaaaatgttattgcatatgattattcagggtcttttatgtataacaacgcttactccacaactgaaacaacagcagacggtgtaataacaaagcataattatgcaccatgttatgaatcgacatcttcatattatcctaatgacaagtattacagttataaaagcagtaatgccagtggaaagtttacgttaaaagaatcagacgaagtatattatatggatggagagaatccggtgtatttgtccaaaacaatttatggcggagacacggtaagatactacaaaagaacatacccggaaatagtaacaagcataatatatgataaagaacaaaatagtattgaaagtacaacgatttcggagtataatgaatacagggatttagtgaaaagctgggacgcatatgcaaacggcgataaaaccaatacagagcatatgacttcgtatacatacgatgatgtgtatcatactcagctgacaaaggaatacaaaagagacggaagcacaacggttaaagaggaaacagtgctgtcagcggattcaaaagttccggctcagagtctgacttatgagaacggaaatttggttgcaaaagagacatatttgtatgaggacaataactcagccaacccaagtacggtcagaagctataagaccggaacggagtatacggagcagaatataacgtatctgaataagtcgctgccactgacgaaaacggtcgcaggggtaaccaccagttatacgtatgatgagctgggaagagcagtaagcacaacggatggaaaaggaaatgtgacatatgcggaatatgacaatttgggcagacagatatccacaaggaatcctgacggaacaacagtaacggttgaatatccgaaagcctcatcagccggacagatattggagaattccgtaataactaaagacggaagaggaaacaaaacaaagtatatatatgacggcttgggaaagataacaaccgtgttcaactgtgaaacgaatcaaacacagacggcctatgagtatgatactgtaggaagaataagcaaaataatagacggaaacggaaacaactataactatcagtatgacaagaagagccgcaagacgaaaatggaagtaaaagacgcagcgggaagcttggcatatgaggagagctatgtatatgacgatgtggatggagacctgtccaaggcggaaacgataaaaggaagcggagccgggaagacagtaagcgcagcatacacagacaagtatggaaacactgtcaaagaaacaacaggagatggaacggacataagcgagacagaatatacatacgactatataggaaacaagctgaacaccaaaacgccgaaagccaaaagcgaaggaaaaggttatacatacagaacagagtacgggaccaaagacggcgggacgtatgtgacaacaacggatatagacaataattctaccagagtagaaaagaacatgctgggacaggaagtaaagacaatagatccaaagaaaaatgagagttcggcaaagtatgatgactttggaagacagacagaagtaaagagcagaatagacggcggagacagcataaaaagctacatttatgacaataacggaaacgtaataaaagagagcataacaagcaataagccgggagaaacggtgacgtacagaaatgtgtattatgagtacgacaatatgaacagactggtaaaaacatacacagacgagccgggagagacattgtatgagtatgacggaaacggaaacataacaaaaatgacaacaggggcagtaaacggagaaggaggagtaagcacaacatatgagtatgacagtcaaaacagactgatatcgagcacagacccaatggggtacagcgaaagttatacatatgataataacggaaatattgtaagcaaaacagacaaaaacggaacagtgacaacaaatgtgtataacggaataaacaacccgttgtcagcaacaagcgaaagagacggagaaacggagacaataacctacacatacgcagacacaagcacagcgctgctgagcatagcaaacgaagcggccacaataacctacagttacgacagaaaaggacaagtgacaggagaaagccgcacaacaggagaaacgctgagctattcatacgataaagacgggaaccaaacaggactaatactgaactcaaccaacggagtaagtcagaacataagctatagctatgactatctgggaaagatgaaagaggtaagggataacctggaaaacgagctggtggcagtgtatagttatgatgaaaacgagaacctgacagaaaagaaaaccaacggaaacacaatggtaacgagctacgagtacaacgaaagcaacttgccgaaaaaggtaagcaaccaaacattggcagacccgctgcagaacataaagggaacatactcggagtacaactacagctactacctggacgggaaccagtcgtcagtaactgacatattcggaaagacaaaaggctatacctacgacagcgccggcaggttgaaaacggaagtaaatgagctaaataagaaaagcaatgaagatgaaaaaataacaacaatatatagttatgatgaaaggggaaatcgaataagcaaagaacaaacaaaggatgaagtgtcactaatgatttggacgggaccaagaccggcgtatgaagaaggagaaggttatacgcagtattattatgataataataacaggttgacaggaagttcttatgattatgaggaatatatgaatgaagataaaacattcacatatgacaaaaatggaaatatgatcacaagagatacagtagtattttacgatgattatccacccgaaggttcatcatatgaaatatatgaagaaaagtatgaaagtttcgaatataacggatttaataggctaaagagttatacagatacgaataagacggcatcatacgcatatgacggaacgggaacgagaatagggaagacagtaaacggagtaagcacaggacaaatatggaacaatggaaacgtaatagccgaatacggaacaaaaggaacaaagacgtatatccgaggagctggaggagaaatagtaaagacaaaggacagcacaagcaacagtagatatttctcatataacgcccacggagacacaacaaacataatagaaaagaatgcggaaagtacatcatttgcagtaacagcagcatatgaatacgacgcattcggaggtttagtaacaggaacaggcggagaagcagacagtaacgcattcagatataacggacaatataccgatgaagagactggattaatatatctaagaaacagatattatgacccaagtataggtagatttactcaggaagacccagcaaaagatggggttaattggtatgtatattgtggaaatgaccctgtaaataaggttgatccaaatggattagatgctataatattaacaaatagcaatgctgttgatttaggacctttaggaacacaaggacatacatctgctatatatcaagatgataatggaaattggttctatacatattggggagataaggcagcggcaataatacgcattccagatgagtatatgaattcactggaagatttcaatgctggtctaaaccaatttttaaccgataatggtttctctaatattacatcaaactatgattgtgctacctatgtggttggagattttttggattcattaagagcagagtatcgtaaaatttataatataaagccaattcaagggaatgcagtattgcatgatcttgatgatgatagtgtaatatatcaaggagataacggatcatataatgtatttacaaacaattgtttacagagcactattgattcatttggtgagggaactttggcaaacgatatgttggcctcggattacatggaatcatgtggatacacatggggaattattccaaataacgcttctgaaaagtttagtgagatgtttatgaatagttcgtttattcgtcaatttgcatttgcaagattattaaattatacaatactatatatgcagggaagtccatgggcgcaagtcggagtaaaagcaaattatgcaagttcagttgttgcacgttaacgttaaatagtaaagtttttaaagaaaaaattcgctatataatttttataataacaattgtttgcaatgtactgtagcataattaggtgcagggattctagctaacggaggatcagtaaatagttatttaactgaattaaattatgtggtcggagttatactaaacaaccaaatatcattatttacttaaatgtttatgaataatgaatttacttttgaaaaaagtatcttattaacttataaattatgttttgctatatagtttaggaaatcagtgggcacaaagttggtataaggcaaattatctaattctgttgttggctacataatttaatattaggaggtataaatatatgtattggtttttgaattgtttacctttgataattgaactatcaatagaaatatatgcgctatatatacctataaggtataatgcgatggaaaataatcttatgtggttatggatattaattgtaagacaaatatatctattgatcattaatataatttttatcaatagaaaaaaaattatatttccagtgggaatattgtgtatgttgggggtaataactataagtgttggtatgatgttagtgtttcacaaaatacaatatggagaatttataggagatgtcccaagtggtatatatggtttgttattaggaattccgactgttattgtgataattgctatgtcgatctattatttcataaaagtaaaatcttcttaagtagcgataagacaatattaaaaacatttggatgtaaagtattgtaggcctataatataaaaaataaatttggaggtaatagaaatgaaaagaataatatgttctttagtatgtagttgtttagttttatcgttattatttggtgctacagtaataacaaatgcggaggatgaaatgaataataaaggagtcatttatgtaaatgatataaaaattgagaatgttgatatgatttcatcaaataataatgaaatatatatgccattgcgagcagtacttgaatcgcttggagctagtgtaatatgggaagaaagtacaggttatatattttttgattataaaagtattagatatgtgtgtcaatttgtatctttaaattcaaactttcctgaagaaaaaaatatcttaatttcaagaattgaaaataaggattctaaaaataactcagactatatacaacttaatccaatgtccggaagtggagcatattgtattataaatgataggacgtacttatatcaagagacaggtaaacgattatttgaagcattagaatgcaaagttgaaattaattcaaatgagcaaatagtaaagatatataataaataaaaattaaaatatgttttttgtaatagtataatttataaaataacattccataatttttataattcaaagtttatttaattaaataatgacaaataggcttcttaaatattataagaagcctatttctatttgtttataaacctaaaatttatttacttactgagtcttcgggtacgtatccagctttgataatttcttcaataaacaaatttaagtctatgccgccatttataattatattaattaaactcttaaatgatggtagtctttttccattttctaagtctatgtattgacgtggtgacagacaacatctctctgccattttctcttgatttaattttagttcaattcttctaaagtataatgtttctccaaagcacatttttaatatgttcatcatttcactcccactctttaaaatatatgaatattctatcaataatatattttaaactatatgttacatattgcgtataaactctgttttcagatattcttataaaatgtgaaaaatgatttatattaaaaattatcattaataaaaaaatacagcttcaaaatccgtgattgaatgtcaataaatgtgttacgaaagtcttataaactaaaatcaaaacatattaataacaaatatagatataaaataataaaaacagataaatcgcttcactacttgatataatatatcaagaggagcaatacaatgattagaattttattgtctaggaagttaggcgaacttagatggacacaagctgaccttgcacggaaaacagggataagacctaatactataaatgacctttatcatgaaatgacagatcgagtaagtttagaacagattgacttaatatgtgaagctttaaattgtgatttaatcgagttattggttggtgttcctaattctgtgtcagagttaaactcgcgtaatcgtttaggtgagttaaaaaaagacgcctagtttggtgtctttttgtgtatattatatgtactaatttggcaatcaatttgtatatgagagaaaattcatgggacgattgtgggactttcccgttttaaaataaataaatataatggaatagatgtattaaaaagaaatataactaccgaaaacacacacataaacacttaatagtattttataactattgagtgggaatgataaatattgtgcttttctatcccgaaaagtgccgattttacggcacttttcgggattttgcttttttagtggctacaaattggctacatcagccgtattttttgtagccattaggctgtcaagctgattggcgacttcgatttgcttgtttgggtataggtgactgtaagtttctattgtagtctgtactctttcgtgtcctatcaaaaatataatattaggtcaactatgaatacggccaatatggacacatatgcccaaatactggatagttacacaaatcaggagggattacaaacaacatttaaatatcaggaaggaaataatgaagatgaaatatatagcgtaacaaattttataaatagaaatttttatattttgactgatgttatccatccaacaggtgcgtcaacacattatgaatattcaaaaactatgtatagttataatagcttaagacaggaatcagcaaggctcattaaacgttatgatgttgttaacgggatagaagaaaatgttattgcatatgattattcagggtcttttatgtataacaacgcttactccacaactgaaacaacagcagacggtgtaataacaaagcataattatgcaccatgttatgaatcgacatcttcatattatcctaatgacaagtattacagttataaaagcagtaatgccagtggaaagtttacgttaaaagaatcagacgaagtatattatatggatggagagaatccggtgtatttgtccaaaacaatttatggcggagacacggtaagatactacaaaagaacatacccggaaatagtaacaagcataatatatgataaagaacaaaatagtattgaaagtacaacgatttcggagtataatgaatacagggatttagtgaaaagctgggacgcatatgcaaacggcgataaaaccaatacagagcatatgacttcgtatacatacgatgatgtgtatcatactcagctgacaaaggaatacaaaagagacggaagcacaacggttaaagaggaaacagtgctgtcagcggattcaaaagttccggctcagagtctgacttatgagaacggaaatttggttgcaaaagagacatatttgtatgaggacaataactcagccaacccaagtacggtcagaagctataagaccggaacggagtatacggagcagaatataacgtatctgaataagtcgctgccactgacgaaaacggtcgcaggggtaaccaccagttatacgtatgatgagctgggaagagcagtaagcacaacggatggaaaaggaaatgtgacatatgcggaatatgacaatttgggcagacagatatccacaaggaatcctgacggaacaacagtaacggttgaatatccgaaagcctcatcagccggacagatattggagaattccgtaataactaaagacggaagaggaaacaaaacaaagtatatatatgacggcttgggaaagataacaaccgtgttcaactgtgaaacgaatcaaacacagacggcctatgagtatgatactgtaggaagaataagcaaaataatagacggaaacggaaacaactataactatcagtatgacaagaagagccgcaagacgaaaatggaagtaaaagacgcagcgggaagcttggcatatgaggagagctatgtatatgacgatgtggatggagacctgtccaaggcggaaacgataaaaggaagcggagccgggaagacagtaagcgcagcatacacagacaagtatggaaacactgtcaaagaaacaacaggagatggaacggacataagcgagacagaatatacatacgactatataggaaacaagctgaacaccaaaacgccgaaagccaaaagcgaaggaaaaggttatacatacagaacagagtacgggaccaaagacggcgggacgtatgtgacaacaacggatatagacaataattctaccagagtagaaaagaacatgctgggacaggaagtaaagacaatagatccaaagaaaaatgagagttcggcaaagtatgatgactttggaagacagacagaagtaaagagcagaatagacggcggagacagcataaaaagctacatttatgacaataacggaaacgtaataaaagagagcataacaagcaataagccgggagaaacggtgacgtacagaaatgtgtattatgagtacgacaatatgaacagactggtaaaaacatacacagacgagccgggagagacattgtatgagtatgacggaaacggaaacataacaaaaatgacaacaggggcagtaaacggagaaggaggagtaagcacaacatatgagtatgacagtcaaaacagactgatatcgagcacagacccaatggggtacagcgaaagttatacatatgataataacggaaatattgtaagcaaaacagacaaaaacggaacagtgacaacaaatgtgtataacggaataaacaacccgttgtcagcaacaagcgaaagagacggagaaacggagacaataacctacacatacgcagacacaagcacagcgctgctgagcatagcaaacgaagcggccacaataacctacagttacgacagaaaaggacaagtgacaggagaaagccgcacaacaggagaaacgctgagctattcatacgataaagacgggaaccaaacaggactaatactgaactcaaccaacggagtaagtcagaacataagctatagctatgactatctgggaaagatgaaagaggtaagggataacctggaaaacgagctggtggcagtgtatagttatgatgaaaacgagaacctgacagaaaagaaaaccaacggaaacacaatggtaacgagctacgagtacaacgaaagcaacttgccgaaaaaggtaagcaaccaaacattggcagacccgctgcagaacataaagggaacatactcggagtacaactacagctactacctggacgggaaccagtcgtcagtaactgacatattcggaaagacaaaaggctatacctacgacagcgccggcaggttgaaaacggaagtaaatgagctaaataagaaaagcaatgaagatgaaaaaataacaacaatatatagttatgatgaaaggggaaatcgaataagcaaagaacaaacaaaggatgaagtgtcactaatgatttggacgggaccaagaccggcgtatgaagaaggagaaggttatacgcagtattattatgataataataacaggttgacaggaagttcttatgattatgaggaatatatgaatgaagataaaacattcacatatgacaaaaatggaaatatgatcacaagagatacagtagtattttacgatgattatccacccgaaggttcatcatatgaaatatatgaagaaaagtatgaaagtttcgaatataacggatttaataggctaaagagttatacagatacgaataagacggcatcatacgcatatgacggaacgggaacgagaatagggaagacagtaaacggagtaagcacaggacaaatatggaacaatggaaacgtaatagccgaatacggaacaaaaggaacaaagacgtatatccgaggagctggaggagaaatagtaaagacaaaggacagcacaagcaacagtagatatttctcatataacgcccacggagacacaacaaacataatagaaaagaatgcggaaagtacatcatttgcagtaacagcagcatatgaatacgacgcattcggaggtttagtaacaggaacaggcggagaagcagacagtaacgcattcagatataacggacaatataccgatgaagagactggattaatatatctacgtaatcgttattatgaccacgaaataggtaggtttactcaggaagatacatattggaatccaggaaatatgatatatggagaccaacaatttgaagaaggagaagtaaagataacggattaccatgctatagttcaaagtgctaatttatatgtgtattgtgctaatgaccccgttaatttaaatgatatatttggtactgtagcaggtgaccgttttgctactccagatgaagcagcaattgactgggcttggaattattatgggataactcagtactcaatgattgaacatgcttcgcttatatatttggcatatgatgaatataatactccttactattcttatactgaatgtgttgatggtcaaccaaattatgttcaaacaacattattaaatactcatattaatgaagggcaatatattgttggtgcagtgcattctcatactgtaactaaccgtttatctaatcaagatttagatttagctattgatcaaaattattctatattatatgttgttggggaatcacaatatagtgatggtgttgatatcagtaaaattcaggattatgatgatggtcgaggctatcaattagaggctgtaggttcagattatggttttaggcatctaacatatagtgaacaaagaaatgcagatgtatattttagaaataaatggaattggttttatgatgagattgaatacaattattacttaaaatcaataagggggtattaaaatgaaaaaatatataatatttgtaatgttgttgtttattagcgttttaataataaatatattcgctataaacagtttatacttaaatgataagcataaaacagttgattatgttaaaggtaaaacgattataaatataactccatattatgattttcagaagatagttgattacgagggaagtaaaaatatagattataaaataaataaaaaaaccgctttagaaattagaaaatcaattataatttcaacaataaaaaaagaagtgaaaatgcgtggagaatatatgacaaacgaagatatttttgataatttaactttttatgtaaataatgaagaacttgatggaaaaaaagtatataaaataaacgcaaaaagtaaaagtaaatttttttcttttggtttatctaaagtattaaattacaatttaaataatttgttaagtgaagaaggtttataaatttttattgataatgataatggaaagatatataagtgcatattaaataaaaaagaggtttcaccttatgtcgatgaaaattgcgcttctataatcgcattaagtatttttattaattgttatatagaaagatctaataaaaataatataatggaatattggcataaaaatgattacgaaaatggcacatatacatatataagtgatgcaaaaggtgttgcaattgaaggtgaaaatgaagatgagtttttccagattagacaatgtagtaaaattaacattgacaagttatttaaattaaacaaaaaaataaatttggattttgcaaaaaaagaatatacaactttaatacgcaagagtaatgcagaaataataaaagtatggtaagttttattatttttacataaaaatatctattttctaaatagttactctgaattcggttatagatgaagacacagcaatgttggctacactctataatcaaggagaaataaatcctccacattcagatccatctcctaatccttttggaataaatgcaagaaatgaatattattatatgcgtgatttattaggaatataaaaaaggagaaactatgaaaaagtatgttaaaatagcagtgacaataattatattattaccaattatatattttctgataaattggggaagtgcattaataagatgcgaagtattaacaataatgcatggttcagagtttggagaaatatataaagaaaagacgatgataggagaactggattatttaaaggtattgaattattcagatgaatatgcagaggtatactatgtatcaaaacatagagccggtggtaatattgtgtcttttgttaaagaaaataatatttggcaatttaaaaattggaaaacagtatggtcaaatacaggaggaagtgcgtctgatgtaatatggccatattggtggcattttatatatggaggattttgattaataaattaacctagggcaagtaattacttgccctagagtacattttatatacgcatatgacggaacaggaacgagaataggaaagacagtaaacggagtaagcacaggacaaatctggaacaatggaaacgtaatagtcgaatacggaacaaaagtaacaaagacgtatatacgaggagccggaggagaaatagtaaagacaaaggacagcgcaaataacagcagatatttctcatataacgcccatggagacacaacaaacataatagaaaagaatgcagaaagtacatcatttgcagtaacggcagcatatgaatatgacgcattcggaggcttagtatcaggaacaggcggaggagaagcagaaagcaacgcattcagatacaatggacaatataccgatgaagagactggattaatatatctacgtaatcgttactatgacccaagtataggtagatttactcaagaagatccatattggaatccggacaatatgatttatggagatcaacaatttgaagatggcgaggtaaagataccggattatagttcaatagcccaaagtatagatttatatgtgtattgtgtaaatgatcctattaatggagctgatcctacaggtttaattccaacagcaagtgaagctgctgatatggcagataatatatatgattcatcaaaaccactaagtggtggatggtttcaaagttatataatgtatggtagtgaaggtttagtaatgggggtatatatgaggtataacgataattattatcaaggtgttgaatatgctttggtcaacaaaggaagctcaacaacaagtgattggataaataatttgcaacaaccatttggattgtcgacggatatgtgggaatcaattgaatatgcaaaagattttgttgaaaatcattgggatgacgaagtaacctttgtagggcattctaaaggaggtgcagaagctgcagcaaatgctttaagactaaataaaaattgtataattttaatccagcttctgttaatgcatctgcatatggtttgaatccaaataattatactgcaagtatgacagcatatatagtagatggagaaatattaaatatgatttttggaggaatatctgctccaatagatcgtgttgaagtacttcaaaggtattcttggaatcctatagttaatcattctatggaagcagtaaaacaaggattatgggtaggtggttataattgattaaaaataaaattttcattgtgataattataattatcataattatattattatgtgcaacacttccgtggttagtattgtggtgcgggctttatttaagtcctaattcttctgaacctgtaatcaaatatgaagaatttccatttgaacttgtttatgagtttaatggtgacaaaaagtatataagcgatgttttggtttgtgagtatgatggtattggaataagtgaaaatattggtaaacataggaagtggaattcaagatttttaagtggtaacgagtatatagaattatcgaatattaatgataaaatgattatatattataatccaggtgaccctagatattacatgggggattataatggagaatttgttagcgattttccaaattgtagatatgtaaaatataacgataaaggaaatttagctgaggatggaataattgatgcagaagaggtatatttaaaatattctattaaacttttaagctggaatattggttctccgataaaaaatttatttataaataaataaatttattaatctaaagttgtaataatcggacatttttatattattgtcatatagatatacaacgaacataatagagaaaaaagcagaaagtacatcatttgcagtaacggcagcatatgaatacgacgcattcggaggtttagtatcaggaacaggcggagaagcggacagcaacgcattcagatacaacggacaatataccgatgaagaaactggattaatatatctaagaaacagatattatgacccaagtataggtaggtttactcaagaagatacatattggaatccaggaaatatgatatatggagaccaacaatttgaagatggcgagataaaaataccggattattatgctatagtccaaagtgctaatttatatgtgtactgcgctaatgaccccgttaatggtattgacccatttgaattatatgatagatgggcagctgttaattatgctttatattggtctgtaaattccaatatatatgaaggcccaattcgatttgctcaagattgtacaaattttgtgtcatggtgcttagatgctgggtttttgcatagatctgatgattggtactttaatggagcaattggtaatggagattatgtatgggggtcatattctgcaacttggactgtatcagatgaacaatttaaagcatttactaattgtactggtgattttcctaattcaacatatgcaaatggacctgcaatatgtcttcatgattctcagtggattcctgcttcaatacaagattataatattcaacctggtgatttattatactttctaaatcccgaaacaaataagatggggcatactgcaatgatagtttcaacagataatggaataattacatatgctcaacatgataacgataaaaacaatggaaatttaaatgaatatttagatacacataatagtccatggtatttcaatacgtgtatgttgttaggataagagatgatgcataattttgaggaaatatcaatgtggaaaaaaataattatatgtagttttattattgcaataattttaatttttatatgtataaaaatatctattccagataattccgacaatataattataggtgtaaaagatataattataactaatattacagagacaaatccgacatatgaaactatttttaatgtatatgactgggatgatgaattaagagaagaagtaagaaaagataaagattcatatttactagtttctattaattatatagttaaaaataattcagagaatattgaaatgaaagatatacggttttatctggattttgatgaagaaataagagaaactgttcaggcatttaattccgataatggagcatattatttatttgttaagccacaacaagtgacgggaatgagacaaaatattttaatcaaatctaatgataagtcaaagtatgaaataaaaaatataatattagatcagtatataaatatgtcgtattttacaggaagttttctaaataatacaggccatggatatagaggaatatgtaaacatatgtatagtttcaaaataaaagatgtattagaaacatataaaaattttcctagtatttttgaataacttaaattcaatggaaccttgcatggaaagagatgcaatatttaaattttagtacttgccatagtggaaatccagatgtatataatttagcatatgcgtttatgatactggacaacttgaagctggaggatatgatggatggtggaaagaaccagttagacagacaacatggtatatgtatgtagaaaaaattggtatggtcatccattaagagaacaaataggttttagatgtattccgggatgatgagaataatgaaaaagattacgatattttttagcgttattgtagtaataattgtatttgttatgatttcatatatgaagtcaagtaatgtcgagtttgattataaaaatataaataatatagaaattgtatcagagcaaatatttaacattcagggaagtgataaaataataagaaaaactatagacaatgaaaaagaaatacaaaaatatataagaaaaataaatcatgttaagttttataaatcatcagatactgattttggacaaagagactttactacaatgataactataaataataatgatggaagtaaaataaagattctttttgtttctattcagtgtaggatacaaagatatgatgaaaataagaatctagtagaaagtaatagagaattatattatttatctccgattagtatatattttttgactcacatttaattaatgttttataaatcatcacataaaattcgtgtgaaattatgaaatatatgttaatataaggattcaaatggtaatatcagaataaataatagaaatttaaaattgaaaatattcacgttaaataggcttcttgtaactttttaagaagcctattttttaatattaaccaaaatctaaaatttatttacctactgagtcttcgggtgaatatccaactttgataatttcttcaataaataaatttaggtctatgccaccatgtattatgatattaattaaactcctaaatgatggtagtcttttttcattttctaaatctgtgtattgacgtggtgacagacaacatctctctgccattttctcttgatttagttttagttctattcttctaaagtatagtgttttactaaagcacattttaatatgttcattatttcactcccactctacaaaatatgtgaatattctatcaataatatattttaaactatatgttacatattgcgtataaacgctgttttttagatattcttataaaatgtgagtaataatatatattaaaatttatcattaataaaaaagcacagcttcaaaagccgtgcttgaatgtcaataaatatgttatgaatgccttataaactacaataaaaatatattaataacaaatatagatataaaataagaaaaacaaatatattgcttaactacttgatataatatatcaagaggagcaatataatgattagaattttattgtctaggaagttaggcgaacttcgatggacacaagctgaccttgcacggaaaactgggataagacctaatactataaatgacctttattggatagtcaacactaatttagacaacttatttaatgttagtaagtcgatattctttcggggtcatatagtccagtgatgagtgaattctgtgattgttaaaccagtttacataatacgataattcatattgcaattgttccaatgtttcatattcttgaccttttacagatttggtctttatgattttaaatgtggcttccgctaccgcattgtcatagggacagcctttcttgctcagtgagcggtctatgtggaatgtctcaagcgttttatcctatgttctgtttttaaactcgtttcctctatctgtgtgaaatatctgtattttctccggatttatatttattccgctaaacgccttgactaccaatgcagcatctttgttcttacctgttggggcagttcaagttcggtgtcttttttgtatattattattttatttgaactaatttgacagtcaattgcatataagagaaaattcgctagactattatggaacgattattttgatcttaatttttaaatgtcattaacaagttttttacaaaaactgataatctttttaaaggtgatgaggatgctaaattagcacttactgaagatttaatgtaaatgttaataattaatgaccgtgcagggtttatgttgcgtaataggttgcaataaatttaaaattggatattagaggtgttaatttagcaaatagggagctatgattgccctataattattttgaataattcatcaaattcagttgtcattttataaaaatatgatataattaatatatttatggtggtgattatagtgagcgaattttcgataaatattactgggcaaataaataattttaatttaccaaagaatcaaccgttattaccattatttgaagctattgttaattcatttcatgctattgaagaacgccgtgataaagataaaaatttcactgcaggtgagattagtattaaaataattcgggagattaaattggaattgatgaaaacgatttagataatattactggttttgaaatatgtgacaatggtattggatttgatgaaaataattttaaatcatttttgtaatcagattctacttataaagctaaaataggtggcaaaggtgttggcagattttcatggttgaaggcttttgaaaaagtagaaattcaaagtgtttataaagagtataatgacaaatttttgcaacggtctttttgttttataaagtatagcaaggaaataagtgacgctaataaatccgcttgtctgattacgttgcacacaggaaaattattatcgatttactttcaacaggtattaggaaaataaataatgaaaaatttagtaaggaagaatttatacataatttaatatttcctatgaaatgttcatcggatgatatagactatgaatctcataatctatggccaatagatgaaagattagcttacagttcttatgtagcatctgatatttcacttaatattaaaaaatgatgatagatttgatttattgttattggataatccgattgctgtttctgaccagcagaatgatggaacagaatttgatactataactatatttgaattaaaacgtccaatgcgcaatgattagtcgtctgcatataatccaattactcaactatataaatatgtagatagaataaaagatggtaaggtcagagatattagcggaaggcctgttcatgtaaaaaatactacacgattttatttatatgccgtgtgcgatataactacaacgcttgaaaaggttataaagcaatttgattttatatctacacctgataaaataggttattataaaattaatgagacttacaatgcttatgttgaaattctaccatttgataaaatgaaatgattcaaaaaagcgaaatagaattttatttgaaaaacttggtttataaaattgtttatataaagcgcagccgacttaacttctccagtttagttggacagcacaaaaagtattatctataattgtattctataatagatggtactttttttgttattatctgtttttactggttctgaataagatgctccgcttttttgtttagaaaatatatctttttttattgaaaatatttaattttcataattaaacacaaaaatatttgtcaaaaagtaaatatatgagactagtctcatatatctttgtgatataaattgataaaatgtttgcatattttatcaaagggtgtggaattatggaacctgttgacattttgaaaatgtgttttagtaatatcctgtattttaaaagaaaagaattaaatctcagtcagggaaagatggctgaaaaatgctgtatgtcattaagacaatatgcagatattgaaagcgggaagaggtttccatcttctattagcctgattaacttcataataaatggcgagatagatataaataagtttatttctgatattcaaaagttaggttatgtgcccaaagacagagttaaaaaggatgaaaagtaaattataatttacacgattcttacacgtttttttagaaatcggcaaaaaatgacttgttataaaatcaatgaatttaattgaaaaacagcgtaattatgtaggttatatggggaatacgacaggattgtaaatacgtaaaaatgttatgattaattcccaccctgtccgccaaaactggaaaactttaagttttccagtttttattttagctataaagatgtattttatataaatttgttggtgtttataaaatcataaatgtgtttaaaaattacttttatattcatatttaacttatgtctttaattaataccatggacttgaaattttttattattttaatttgtaccaaacattttcgagattttgcacggcgctttcaatttcaggaatagttaatccggcgtaaccaaatacaaaagcatttttggtcataatattatttggttttaataaaaattttgtcatttcaaaaatctttactccattattaaatgcaagttttgttaattctgttccattcatttggctgtcaaatattccaagcaaattcattcccgtatcataattattaaacttaaatcgtgggccaagtttagatttttgtatagaagaaataagataattgcgtttgtctttcatagttttattgttgcgttttattaaacgttccagttggccgctgttaatcatgtcttgatatattttttgttcaagaattgttatgagaggcgaatatgtttcaattttttttattactgattcgaccaaaccgtgtggaagaaccataaacgaagtctttacgttgggagaaatagttaagtcgaatgaatcaataaaaattacattttctcctttatatattgaataaattggattaggagtattattggtataatttaaatttccgtcagttgcaacttctattacgtatttgctgctgttttttccgctgcaccactgggcaagttctctgcgctgctttttagacatgcaatgtccggttggaagttgattttccggcattacaaacataacgtcaataccgagctcatccagtttgtcacatttaaatccgttgtctaagtctatatcaaccagtcttatatccaaaccaagattttttaaccatataaacattttataatcagtaggattttcaaatccataaactttatcagttccaagtatcatcactacaactgtaagaagatattgaatacccgcacctaaaaatatatcacttacggagcaatctatattccgcctattatataaaaatcttgaaattgcagacctaaattctaattcccctcgtttatttccatgcatgtaaaagctggaaaaatcatttgcttgaatatatttagtgagcatttttgaatatgtatcgtccaagttggatatttcacaattattataactaaaattataagtatagtctgtgttgctttcccatggaacatcatcatattcaccgtattgtatatcattagactttacataaaaaccgcttcggtcaattgttattacataaccttcatctactaatgcctggtatgcgttattaattgttgtggtacttaaatttaaatcttttgctaggtttcttcttgatggaagtttttgcatattttcgagctttccggtatttatgtcatttataaaggcttgtttaacttgcacataaaggggtataccattattcttttttataaaactatatatagacataataaactcctcctaattattgtaatattataacataatatcagtagtaattcaatactttttgtcttttggtatttaaaatatttttttctggctattgtttcttttggttattttatatataattaaagagaaaagattaaaaatacattaaaaaataactaaaagtttaaggaggaaaaaggatgagaaaaagatgtataagtttggcagtggcgataatgatgctgctcacgatgttgtcgggtatgacattggcgacagcggctgagcaaggtgccggacaagagggaacatctgaactgatgggagaagtatacaagacatttaactttaaatcggcagaagtagacggagccataaatgttaaaaatacagacatgtatgacgcgtcaaagggatatggatttgtgaaaacaaacagtgctatgcctgcaagaaccgtagatcccagtaaaataaagcaggatgaaaacggctgcagcataactgagacagacgcaacaacaacgtattcaaatgtaaatcattataactacggaggtctgatattcagagttgatgtggatgctttgggcggatacagtcttgatgtaaatacaacagcagacacaaattccggaacggcatatatagctcctaacggtatgcaggcaagccgtttgacaggaggtggttcatgggattctgctggtttagtaaataaaaccggtatggcggtatgggacaataataattggaaatatgattatgttacaggagtaccgtacatagaattggaaatagagcctaataaaaggccaacctcagcaggtacaacagttggtatagagagttttactcttacaaagtttggaaataatgtgagaacagctgatgagaagccaacagtatttgttttgggagactcaactcaaaagacatatacatttgaagaggatagtatgtccggttggggacagaccattaatcgaatgtttgatttagagaaggtcaatgttataaattattcaatgggcggaagaagtgtaaaggcaaattatgatgaaggcaggtttaatgatgttctttatgttgcaaaggaaggcgattttgtcttattccattcagcgcataatgatgagagtacaggagctgacaagggaccggaagcaagatttggaagaggttcaaacagtacaacgtatccgaaatggctggatatatattgcgcagcaatggaagagagaggcgtaactccaatattagtgtcaggaatgccgagaacgagtaatggcgttgcatcggtaagcagtgagaagccaaggggctttaatccaaactcgccgcagtttatggaagataaggcaaaggctgataataaagtagagtttgtagatttgtttgcaaaggcaaaggcatattttgaaaagataggctcagcagagacaatggatatataccaaagtcttgaagccggagagtcaccgggaaaaacaaacagcggctcatatgcaaacggacatcctgataacaaaatagatggaacgcactataaagaagcggcaggaaagatgttcagcaaactgattgcagaggatatttatgctcagagcgcggctggcagtgcaaagataaaagaattagcaggatacctgaacgacaaagtaaaggcagcatgcacaagcggaaattggaacgaagtatatcccgaaaacagagcaaaggatgtaactgaagcaaaagtaaacggatattcagcttcaaattcaaagtatagaaatcaaatagaaaaaatgcttcaaataggagctatggatacagataataataatctgtttaatcctgagaagtcaataagcacaaatgactttatagcaggaatatgcacaatttggaatttagaaacagcagattttgcaaagtatatgaacagcggaacgctgaaccgtgaaacaatggcgggaatagtatatgacgcatattcattaaaattcggcagaaacgctgaaacaggagaatggaataagccgaagtatatgacggattacaatggttcgagtgtatctcctgatgatccggagtatgatccgaatttaacaggagagagcgcacagtattatccgttggtaggctggggaaatcttacagatactaaagatatatcaagagagtacttagaaaagttctatgaagtatataatttgggcttaatgagaagtgaaaaaggacttagcagaacaaagatgatgaacggaacagagttggagccaaaggcagaagtgacgagagctaaggctgcaaaagaactgtttttcctgttcggattacagcagaacataaagacagaaaatcaggagccgacagtaccgaccaactatggcggaacggacaaaaatccggtagtgtataaggcagtaaactatacagcaatggattatgagttcagcgcagtggatatagactatgacggaatgctgagtgtagagctgaagtataatggagaaggaacaccgtcaaacaaactggtggttgagagaaaatcatcagagggaacggtaacagagacaaagaagtatgatgtaagcggcagcggaaaagtaagcggacttgatatgaagcttgagttcggcgaatcagttaacatgtatgtggtaacaagtgacgctgattcaacaaagctgagtgttgaaagaaccgcagaatgcacaaatgtagtaataccggcaaagaagtatacggcagaaacagcagccggaattcaaggcggaacagtagctctgacaaacttaggagaaatttcagctgaaacagcagaactggaatcagcagagttgagcagtgcaggagaagtatggtggagagcaaacggagctgtaaaagaaggtcaggaacttatgcctgagctggcagctatgggcggaagtttgacgccgatgatgacattggatgtaacagggagcacaaaagcgacaatagaaggagagtcgtttacaaaatatgtttcacatggtgaaacaaacggaaaatttgaaaacggaatgataactggtgcggcaatgaaattcgtagcaccagcctcaggagtgctttcgttatacgtagtagatgtaggaagcggtaaggaagtagcaattacagaagaaggaacggcaacgaagacagactctgcgtattaccatatagcaacggcaaaagagaatgtatgtgcaagcataccggtagaagcaggaaagacctattatatgggagtactgggatctaagggaagatttgtcggaatatcgtatatatcgggagcgccggtggtatctgtaaaagcaagaccgggagagaccgtgcagatagacgcagttccggaagcaggaatgacaacaaagggaatgagcgtaacaggagcagcaggaagcgcggtagatgtaacgatggccggagcaaatcaaggaacctttgtgatgccggaggaaaatgtaacgatagatgtaagttttacaagcggaggagaaactgaaccgtcggcaacacccgatgttgtaccaacacctgaggttgtaccaacgaccgagccgttaggatatgcttatgaaataacagaagcatattatggtgatgatggaaagctgaacgttgagttaaagtacaacggaacagaagaaaatccaacaggaaaacttcttgcagcagcatatgacgaaacagacagcgagataatgttggatgcaaagagctatgacataaagggaacaacggttgaaggacttgattacagcaagcctgataaaggaattgttaaactttatatttggaacggtgttgataccttaaatcctttgtcaaaaacttttgaggttaaagacgttttaagacctactgaatcaccgtcagcaacgcctggtcctacaagtgaaccgactgttaataaagcaacactgacgcaggaaagcagcggagctaactttgagttttctacaataagagacgctgttgctaaagcgactgaattaaatccacagtctgaggctgaacgtgttgtaattaatgtagatccaggattctatgaagagcaagtattatttgataatgtaaagtatataactcttcagcagactcccggtactaatggtaaagtaaatctttcatggtattattgtactggttattgcgcaggcacagcagatttaaacggaaactatgatcctaaaattaactggtcaaaagaagaaacctggaacggttataaagatactgatgaaaagtttaccaaatatgaagtaggtcaggtgttaaatggtgtttcaactatttcatattatgatttagacggagttgctcataaggatgtatcagttagagtttctcatttaggaaactttagtgatatggctccgcttgtagtaagaaagtctgcaagcgacataacagttaaagattttaatataataaatagtatacctgttatggtaacaaaaggtgaaaaggaagcaggagtaaagcctcaggcagatagaaaacttattcccggcaaaacggataatgagttaaaagatatgcttccggagcgtgatagtttgagcatttgttatgaagacacagccgaagttgcacctgaatcagtgttgaattctgataaaaccgtaagtaaagcaaaatatatagaaaaaacaaaagatggaaactatacatttacccctgaagaaagcgcgtatttagctcgttcatcaggattcaatgaaagaggtcatgcagtttcaataaatggcgacagatgtatacttgaaaacattcgcgcaagaggtaatcaggattcagtatatattagtgaaggaagaatatattttaaaaattgtgatttaataggcggaacagactatatctatggtaatgcaacagcagtgtttgataactgtaagcttggagcagctggaatgactgataaggattacggcgcaacaataactgcggcaaatactgatggtaataatgattatggatatctgttctataactgcgagctctataatacccgaaataatataacaaattcaatgtatggaagaccatggagacaggacgcgcagattacattctataatacagttatagacgacaatgcaactacaggagcaagcccggcaggaataacagcagaaggctggagagatatgtcaggcaatatgaaggaagacgctcgtttctatgaatacgggaccacaaataagagtggagaagcagtagatttttctaagagagtaaaatgcaccaatggttttggttctgttcttgatgattggcagattttagagtttaatcctataaattattttaaagctagatataagtggacagataattgggatcctatgaacatgacagaaaaatatgccggagttaataaagttgcaagtgagacaacatttgttattccggaaggaacaagtacagaagttgatctgcctcagcctcctgccggttacgaatttaagtgggaatcagcatcagaatatgccatagtaaacaatgatggtacaaaggtaaccgtaataagaccggctaatggcgagacgccaatcgaaacaacacttgtactctatattagggaatcatcagataaagctataggtacaaaggcggttattcctgtaacaattaatccgacaacggatactgaaaatgtgtttacagctacaggaaccatttcactaaacggtgcagctcctgatgttgatgttgacttcacagttaagttctataaaggaaatgctgtaatcaagcaaacatctgcacagattgctaagggagccaccagcgctgtatatactgccgagggtattccggtaggtgagtacgatgtagtttttgatactttaacagacggatataagattcttaatcctgagaatggaaaaactactattaatggagctaaaggtgaatctgtaacatcggatgcatcagttgctaaacttgttaataagagttactcggtaaccggtaccccgacaaatttgggaagcggtgcaacagttgcaaataacaatggtgaatatacagtttctagcagctcaaaaacctcagacggtgcatattggaatttatcatcattatctgatggaataaaatctacagacgcagttactgtaacatttacagtaacaatggaaaagggctatagtacatctgatgattgtgctacggtagatctcttaagcggaattcctggaacatataatagcgatgaaaataaaatacgtatcgctagaacaagttatggacgttgggatcaaatgaatatgcttgacgttggggttggaagacgaagcggttcttcaaatactgaacatcagtggcttaactgtgcgggaggaaaattcccggctacaaattatgcagatcaaattgttagtataactgctaacttcaaaacaggagttttgactgctaaggctaaggttgctggagcagatagctggaatgagtataatatgtttactggattcccggaagcctctaatatagacagagataatctttgccttgctgtttatcctggttcagctgatccaaataagttcataattaaggatataacagttgaatatacagaatttgaataatctgtattcaaaatttatttaggtagtaaaattaatttatagatttcttcccaatgagagaccgtccgatatcggacggtctttcaatttgttggttcatttttgtgtcaaagtgttgctaaattaatatttatgtggtataatactaagacatgttccgaactaggaggggataatatgctatgttgcagatgtaaaaaaaacttagcagttgtatatatttcaaaattgaatccggacggtacgcagaataatgaaggttattgtctatcttgcgctaaggaattaaatttaggccctgttgagtccatcttagacaaaatgggggttgaccctgaagaaatggaccgcttaaatacagaaatgaagagtatgttcgatgaaatgggtgatgattttgaccttggcgagagtatagatttgcttagacaagaacttggtggcgacgcagatataatttcactaactgaagcagatgatagtgaggaagctcaggaagatgatcaggaagtttctgatgattccgataacactaaggaagaaaataatactcctgacagcgaggaaaaaatgagccgcagtattcagcgtaatccgtttgagtttatgagcagatttatgaattcaaacagtgagagtcagagcggtgaaccaggaaaagctggacctagaagaactaaagaaaaaaagaattcaaaaaagaaaatgcttgatacttatggggttaatttgactgaaaaagcgaaaaaaggtgaaattgacgctgtaattggcagagagcgtgaaattgagaggacaatacagatacttaataggcgcacaaagaataacccttgtttgattggtgagcccggtgttggtaaaactgcaattgctgaaggtttagctcttaaaattgttgagggggaagtacctcagaaattgcttaattatgagatttatcttttagatatgacgtcggttatagctggaactcagtttagaggacagtttgaatccagacttcgtaatataatagaagaggttaaaaaagcgggcaatatcattcttgttattgatgaaattcacaccattgcttcagccggagatgctgagggagggatgaatgccggcaatattttgaaaccggctctttctaagggcgagattcaggttatcggggcaactaccattgatgaatacagaaaatatattgagaaggattctgctttggagcgccgttttcagatggttatggttgaagagccaactgttgaggaaacaatagagattttaaaaggtatcaaaggctattatgaagattatcataatgtaaaaataactgatgatataataagaacagcaacagttcttgctgaaagatatatccaggatagatttctgcctgacaaagcgattgatgttattgatgaagctgcttccaaagttaatttaaataataacgaattaattgaactggttaaactacagcaagaacttaaagaaacccaggatgcaaaagataaagccgctgcggaagatgactataaaaaagcagctgatttaaaagttcaggaaatacagctgcaatcaaaaatttctgaagttgagaaagcgtcgataaaatatttggaagcagaggatgtagcttcagtaattgaaaattggactaaaatacctgttaaacatattagtgaatacgagtctgaacgtttagtagggttagaagacagacttcataagggagtaatcggtcaaaatgaggctgtaaatggcgtagccagcgcaataaggagaaaaagagccggtattagcttaaaaagaagaccggtgtcatttatttttgtcggtccaacaggagttggtaaaacggaacttgcaaagcaaattgccagagaagtttttgacggtgaagacgcattgattaggcttgatatgtctgaatatatggaaaaacattcggtttcaaaattgattggttcgcctccgggttatgttggatatgatgaagccggtcaactgaccgaaaaaataagaagaaaaccatacagcgtaattcttcttgatgagattgaaaaagcacatgctgatgtatttaatatgctgcttcaaattttagatgacggaagaataactgacagtcacggtaaagtagtgtcgtttgaaaatactattataattatgacttcaaatgccggaagtgataaaaaatcaaacgttgtaggttttaatgaagacgaagaagccactcatattaaaattgacagagcgcttaaagagttattcagacctgaatttcttaatcgcattgatgagattattatatttaaggaacttgaaaaagaagagttaattaaaataatagatttgatgctgcatgatttgtctgacggattgaaagaaaaggatataactcttgaagtttcaaataaagcaaaagaatttattctggataaatcctataacagacaatatggcgcaagaccaatgcggagatttattgaaaagaatatcgaagataagttagcgcagatgctgataaaaggtgaactaatacatggcaaaactgttctaattgatatgaaggaagatgaaataacagccgctataaaataaaattaacgcctgatattgattatcaggcgttaattttttatctatttagacatttcttccgctttattcacgcatgaatcaatagcactctggattgaacttctgaatccggttttttctaaatcacatacggctgcaatagttgttcctccgggggaacaaacattatcttttaacctcattggatgttcgctgctttccaataccattttagcacttccttcgacagccttagcaactaatttttgtgatagcgctttggggattccatacttaacaccgctgtctgccattgcgtctataagcatatatatatatgcagggctgctgctatgcagcgcgatagctgcgttcatatatttttcttcaagtcttacggtttctccaactccggacaataaatcctcgactaacctgatttcacattcatcgacattttggttcggggttataacggtcataccgcatttaacgagagcaggagtatttggcatggttcttataatctttttatctgagccaagaccgtttgccagggcgtcaagcgttattccggcggcgatagaaatataaattttttcattatagccgtttaagttatttaaaatttgcggcattatatttggcttgacagataaaacgattatatcaacccgctcctcaagctcagttattgaatttgacggaacaattcctaatttgtttgaaagttcttttaattttactgcgtcaatatcataaacagttatttccgccggtttaaatttttgggatgaaataagtccggaaatcaatgcagtggccatatttcctccgccaataaatcctatagtcataattctgcgctccaatcttttggttaattaaacagtaagttccacttcttcagctaaatcattattatctaaaacaggatttacgtattcgtctatgaattcttcaacttgacttacgcttcttcctataaagtttttaggttttaatattttgtctatttcttcgtgactcaaattaaacgaatcatcagcaactattctttcaattaagtcattctctccgccttgctctttaactacttttccggcgtccatagaatgcttgcgtatacgctcgtgaagttcctggcggtcgccgccgtttttaacagcgtccatcatgatattttcggtggccataaatggaagctcagacataatacgtttattaataactttcgggtatacaaccaatccggaagcaacattcatataaatattcaatatagcgtcaacggttaaaaatgcttcagctacgctgattcttttgtttgccgagtcgtcaagtgttctttcaaaccattgagtagaagaggttatggctggattgactgcgtcgacaataacatatcttgccaatgaacaaatacgttcgcttctcataggattacgtttgtaagccatagcagaggaaccaatctgagatttttcaaacggttcttctatttctttaagatgctgaagcaagcgtatgtcatttgcaaacttatacgcactttgagcaacatcactcaatactgacagcatttgataatcaatttttcttgaatatgtttgtccggaaacaggataaaattttgaatatcccatcttttcacagatttttttatcaagagctttaactttttcaatatcattatcaaaaagttccataaagcttgcctgcgttcctgttgtgcctttgcacccaagcagagccgcgcggcttagctggaagtctatattttcaagatccatcaacagttcccatatccaaagcgttgctctttttccgacagtagtcagctgagctgcctgaaaatgggtaaatcctaatgtcggcaagtctttgtatttaagagcaaaatcttttaataaagcaattactttgagaagctttgtttttataagttccaaagcttcattcataattattaggtcagtgttatcgccaacataacatgaagtggcgccgagatgaataattcctttagcattcggacattgctgcccatatgcgtatacatgagacataacgtcgtgacgtacctctttttcacgggcttcggcaacgtcatagtttatgttatccacgtttgcacgtaattcttcaacttgttcctttgttacattaagaccaagctccatttcggattcagccagtgcgacccataattttctccaagttttaaattttttatcgggagagaaaatatatttcatttctttactcgcataacgggagtttagcgggctttcatatacatctttattcatagtattgttcctttcagatttaaaatttctatttgactaaaatttttattatcttaaattatatagataaatttccaaaatcttataaattattagtataaacaataatttaatttgtttggaaaataaataataaaattcagctatataatctacaataagatatttatgtattagaactattgtataatattgtaatataagaaagaacaaattgcaatattgaatttgacaaatttttaagtcactatcatagatattcatatataaaaattaaatattaattttataaagtctgtaaaataatcatttgttataataatttaatataaatttgcggattccggtagattgacaagtgcagcaaaaatctcatcaggtaaaatcaggtttaaacataggtgtgtatgtaaatagtttaacgattttgtttgactctctatcttttagaattctaaaataaaatctgttttaaaaaataatagtaaaatcccatttatatttttatttcaacctctcttccaaggagagaggaaccgcaaaatatacttttgtataaagtgcttttctaatttcattaaacttagcaaaatttgaaccagttatctaatgttatagttttaatgtatttttatataatataaattctgtatcacgcaatgtataatcgttgtgttttattattataataaatttttattttatatgatttatgctgtataaaaaaattaatatgctcaggcagatatgttatatataaatatattatagtgacgttaattgattatgtacaaacagtataataatatttgcagacaaatagagcattattgcaagtaagttcatataagtatacttaattggtattgaattaaaaattaatatcgctatatataattgcttatatcataaaatgcgttttcaatatgattaatttcatccaatatgagttcatcgttatttattattttataataaacttcaataacatcaaatctaatttggtgttcagatgggttttcaaacataaaattttctgcggttcttataatactttgaattttctttttatctatagattcagcagcataaccaaataactttgattttcttgttttgacttcaacaaacaccaaagtagtgttatccggtgtcacagctatgatgtctatctctccatgcttgccatagtagtttttggcaataattgtatatccttttttaactaggtaattagatgcctgtatttctccataattaccggtttctttagtattaggcataaaagtatcaccgttttaatttgttttatttattccaagaactttatcagtcataaaagtttttctatgtataggctgaacgccgtattttcttattgcatccatatgagctttagtagcataacctttatgcttttcaagaccgtattcaggataatcctttgatagctcaacgatatatctgtcccttgtgacttttgccagaatagacgcggcggcaatactttgggataaggaatcgcctttttttatatatagagtttcaatgttatcaaaatcaatattatcatttccgtcaacgattaaaatatcgggatgtattttcaaaccattaactgcattttgcattgcagcatgggtagcttgacggatatttatttcatcaatgacatcctggaagacaaattgaacagaatatgctaaagctgattctattatttcattatataacttctcacgttttttctcagataatttttttgagtcattaacgccgtcaataacaagtccgttgggcagtattactgcggcggcgcataccggtcctgcaagaggacctctgccggcttcatctattccgcatatatattcgtatccgcgggatattaaatttttttcatattgcaataaatcaatttccatatcagttttcctcatttcttttgggttcttcaagagttatcctgcctagtttggcagagcgaaaatcagatataataatgtttgctgttctaaaggtgtccacttctccgccggatataacacagcctctcttgcggccgatactttctaaaagttcgtatttatttaattcactgtctgaatcatttaagttatatgtctttatgagactatctatataagattcttttaaataccctaaaagttcatatgctaaatcctcaacatccaaaatttcatctttgattccgccagtgaatgcaatctttttagcgtcgtccacattctcaaattttggccaaaggattccgggtgtatctaagagttcatattttcctgctattcttatccactgtttggtctgtgttattccgggtctgtcaccggtctttgccgctgcacgccctgacagacggtttataaatgaagattttccgacgtttggaatgcctattaccatcattttaacagcgtgcctttgtataccttttgtctcatctcttttgaatttgtcagttagaacaatttctatagcgttatcaagctcttttttcaatcctttgccggtttggctgtttgctgaaattgcttctatatttttatctttaaaataattcagccatttcatagtcaatgagttatcggctatatcggctttatttaaaacaacaatacgcggttttgaaccaataattttatcaacgtcaggattgcgtgaagaaagaggaaggcgcgcgtctacgagttcgattactacatctactagtttaaggttatcttgtatcatacggcgggtttttgccatatgaccggggaaccattgaagctgatatttattgttcatatatatctcctttttaaatctctataaagtaaacggtattgccgatggcaataccgatatattcacacttattatgcaacaaatttgaaattcatgttttcatcttcgattaaataagaggtagtagctttataagagacagaaccaaatttatttaatggccaaaatctaaatactgctccgcctattaattcacttttcggaacctgaccaatttcacggctgtctctgctgttattcctattatcccccattacaaagattttacccttttctataacaattggattatctttgctataatttcctgatgcgatttgttcagctatataactgccggagcgtgttgttttagctttgatataaggctcgtcaataacctggtcattaacatatacatcgcctgtctcgaaatcaatataaacagtgtcgccctcggttgcaataactctcttaacatatggtcttttagggtcagatgatggtttaaagataacaacgtcgcccttttttggtgtatagaataatctgttaacatataatctatcattttcctgcagtgttggctgcatagactcaccttgaactttaaccaaagtgaatacaaaatttcttataagcagggcaacggcaacagcaataactatcgcaataacccaatctctgatttctttcatcatgtttacttccttatgtgaattttttggttttgccgctgagatatttcctctttttacaggtgcgcgtccggccgcctgtgagtttgcagacacggtattctgaacttgtcttcttttaaatgcttgctcattactcttagaagctctagatacatgtgcggaatcacttggtttagaagaattctgctctgaagctcttttttgacttgatggagcagtattttgtctcttctgagacggaggtacagcttcagaaattttaggcataacctgcgtttctcctgaagacattattgttcgtctgcgtgtatttgcagaagaggaagaggcgtttaaaacgctttcatttcgctggggacgagactgtggatttttagaagcagacggagctgatgaaaagttctctatcgcgtcaggctgctgtctgtgggcgttgctgaaaacactgtctgatgaagatacggtcggtacaggcttttgaacatcggcagtatttctgtgggatgaagccatttttaaatcagcgttggcagcttcctgggcttttagtcttgctaaccgtcttgccttagcctcttcttcagcttgtatttgctgttccatttctctttgtcttgctaaacgccgctggcgtctttcttcgatttcacgaagcatagagtcagtttgagcatttatttcagatttagctttttcaacagtttcatcaatatttccattgttctgattgttcggcttttgatttttattattcataataaacactcctaaaataactacaaaatgctaaagagtggtgattaaagattaaccaccactgcattttttaactattaaagtttctctttaacctttgctgctttaccaactctatcacgtagataataaagcttagcacgtcttaccttaccatgtctaacaacctcaatgcggtcgattttaggagaattaacagggaaagttctttccacgccaactccataagaaagacgtcttacagtaaatgtttcctgaataccgccatgatttttcttgataacggttccctcaaacatctgaactctttctctgcttccttcttttaccttgacatacactctcaaagtgtcaccaatagcaatttcaggtaaatcttttctgatttgttcttgtgtaatttgttgtaaaatatccatttttacatcctttccttttaagatattcttgccacacatcaggcagaggactacctattattaactttataagaatagcataaaaatatcatatttgcaagtaatttttaaacatttatattttttgagaaaattcgccaaaaaaatcttataatttattttaatagttagtaatgatagtaaattatgtttaaataaaacctatttaactatttcctcaaccggttcttcattttcagggtctataattgcgtttacaaattcaacagggtcaaaaggttctatatcgtcaattttttctccaacgccaataaacttaacgggtatgtcataatcattcttgattgccaatacaataccgccctttgccgttccgtccagttttgtcaaaataattcctgttatatctgcggcctctttaaactgtatggcttgctgaaccgcattctgacctgttgttgcgtcgagcacaagaagaacttccttgctggagtttggcagttcacgattaagaatcttataaatctttttcaattcttccatcaggtttttcttattgtgcagccgtcctgcggtatcacataaaagaatatcaatatttcttgatttagctgcgtttacagcgtcatatataacagcagctgggtctgaaccttcctgctgtttaattatatcaaccccggcgcgttctgaccaaacttcaagctgttctattgctgcggcgcggaaagtgtctgcggcggctatcaaaactgatttcccttgatttctatacatatttgcaattttgcctatggatgttgttttgccaactccgttaacgccaatcaccattataacagccggcgtgccttgaagttcaatttctgaaccgctgccttctgttaaaatatcactcattattttatttagttcactttttaattcataactgtctctaagttttttctcttttgcagcttggcgcagtttttcaattatatccattgatgtgtttacgcccaaatcggatgtaataagaacttcttcaagctcgtcaaataagtcgtcgtcaatcttcttaaatgtttttaagactgtattaaatttttcatttatactttcctttgtttttgcaagacttttctttaatttatcaaataatcccattatttactcacctcgtcaatatttaatgttaataattttgaaacgcctttttcctgcatggttacgccgtataaaatattggcggattccattgtgcctcttctgtgtgtaactacaataaattgagtgttttggctgtattgttttaggtattcggcaaatcggtaaacgtttacatcatccagcgccgcttctatttcatctaatatacaaaatggagtaggacgtacgtttaaaatagaaaacagaagagctattgcagtgaatgctctttctcctcctgacagcagcgttaggttttgaagtttttttccggggggctgagcctcaatttcaattccgctttctaaaacgttatccgggtctgacagacttagattggcttgtcctccgccgaacagctcagagaatacccggctgaaattttcgttaataattttaaattgttctgaaaatctttctttcataattaaaagcatttcgtctattatgcgaactaattcttttttagatttttctaaatcgtttgtctgttcggtcagaaaatctaccctttcgctaacagtcttatactcttctatagaatcaatatttatattcccgagagattttatttcctttttaagttctgttattctttttattgaactgtttaaatcgaacccggtcaaatctctgtttgacgcgtcgctgtaggttaactcatattcttcccataaatgattaattattgattcaagctcagtttcagagttttcgtatttcgtttgtgcttttgcaagacgcccggatagattaaacaaggtttctcttatgttattgacagaagcctgctggctttttattttttcgtcgatttcctgtctcttttttatataagattccagtgatgttctggtatcaagcaaaagttttttatttttctcaatatttttttcaaaatcaagtttatttttacgcaaatcctcaattgtattttttagcttctcaatttcagattgtctgtttgaaattgatgacaatatttgttccttctccgagataactctctggatcttttcatttgtttgttcaatgtcttttaaaattgtatttttcttaatactgaggtcaagcattgtatgagtaagcttttcgtttttgcccgacagttctgcaaacgttttttcttctttatcagcctttatttttaattcatcaacaattttattaatagaaagaattttagttttattttcagatatttcgtttgatatgttattaattttattggtcaaatcacttaattcttctgaaagtttacttttatcactgctcatagtatttaatacatcatttaaatgatgtttatctgatacaagttttatcaatgtttcattatatgccattaacttttcattgttgttttttatatcatccatcaaatcatttgtttcaacagaaagcgttttaatttttgagctgcttgtttctattattttttctacctttaaaatttcggcggctaaattttcaatttcatttgctcttgagagcgaaccgattgacttagctatgctgccgcctgtcattgcaccgcctgcctgtataatatcaccgccgagagttactattctgaaacggtgtgaacagcccttccccattttcactgcgttgtcaattgtgtcaactacaactgtggaagaaagtacgctgcttattattggcttatatatatcggagcagctgcaaagagagtcagcagtaccaatgtatccatcataactttgggctgatgagttgtttatattttttgcttttattgtggatataggaagaaaagttgctctgcccaaattattctgctttaaatattttattgcagttttagcatcttcaggggtatcggtaacaatgttttgagcagtgtttccaagagccgtttcaactgcggtaatatattttttatcaacttttataagctgtgatagcggaccgtgtattgttattcctgataatttcttctgttggtaagattttataatattcttaacgcctcggctgtatccttctaaatcgcgttccatgtcgatgagcattttttgctttgaggttatttgaccaagtttaatattatttttgtttttggatgatacctctttctgcaactcaacatttttagaaccgtatttttcttcaagctgatttattttgttttttaagtcattgatattgttttctttttcaactgtatcttttgcaagtttatttaattgatttgttatattattaatatctgattctttttggcttaattcctgctttataatatcagaacgtgagctaaagttatcaataagtattttttggttttcaattgaattttctatattttgaacgtttgtagtatttttaagtatttcagaacgcagcgtttcaatttctttacttttttcagtcacatcaattcctgcacggtttgctgaatcctgcagctctaatgaacttttttcaaacgcgtcgttttgagatgtcagtgaaagaagactgtcttttaaattattagcttcgatgtcaagttcggccatacgtttggtataatcatctatttcagagataaatctgcttatagtatcttctgaatgttttatatcgctttcagataaattcagattatttgtgtgctcatgaataagttctgtaatactcctgtcctcagtgcggcagttctcacattttaaatctatttcttccgattccttaaacattaaagaaattttttcatcattttctgttatctgagtttgtatatcatttatttgattttcatatatttctatatcttcttttagtttttctagtatttctctttttttgtctatatttataactgaaacgtttatttcaagctctttcatttcttcgtgaagaacaagatatttttttgctttctcagattgctttttcaacggttcaagctgactttcaagttcgctcaggatatctttaacacgggtaagattctcagtggtttgggagagcttcttttcagcttcattttttctgtatttatattttgaaataccggaggcttcttcaaaaatttggcgcctgtcctccgattttgtgcttaaaatattatctatttgaccctgcccgataatagaatatccgtcacgtcccaaaccggtatccataaaaagttcatgaatatcctttaggcggcatgtcgttttatttatgtaatattcactttcaccgctcctgtatatacggcgggttacctgaagctcaggaaaatcaatatcaaatattccgctggaattatccaatgttaaggttacttcagcaaaaccgagagcctttcgcttttcggttcctgaaaatataacgtcttccattttgcttccgcgcagcgatttaatgctttgttctcccattacccagcgtatagcgtcagaaatattactttttccggaaccgttaggtccgactatagctgtgatacctgaattaaaatcaagataaattttatcagcaaaggatttaaagccctgcatctcaatattctttagaatcatatttttgctccattatagatttaaaactattcttttacaatatgcaatataaattgaattatatcataaagtttttttattgtcacgtattttttataatttgaaatgaataaaaaattcatactataggtcaatatttctatacttaaatttgaattgttacttttatgtttcaatatttattttgctattgacacttttatttagaatgatatactatatatattccgttttttggaacgagtataccatatattgtattatatttaatttgttattatattttctggaggattgaaatgattaaaactattgttaaaagggatggccgcgaggcggaatttgatgttgtaaaaatttcaaatgccatttataaagctgccgaagcgcttggtggtactgaccatagtatggccgatgaacttgccgagcaggttgtggattatgttgaaaattgtctaggtgtagaaagacccggtgttgaacagctgcaggacgcggttgaaaaagtccttgttgataatggtcataccagaactgcaaaggaatttattttgtaccgtgctcaaagaagccgcgtcagagaaatgaatactgagcttatgaaagtttatgaggatttgacgttcaaatcggcaaaggataacaatgtaaagcgtgaaaatgcaaatattgacggcgatactgctatgggaaccatgcttaggtatggaagcgagggtgcaaagcgtttttatgatatgtttatattagatcctcatcattctgctgctcataggaacggtgatattcatatacacgatttggatttcctaacgcttacaacaacatgctgtcagattgatttgctgaaactgtttaaaaatggtttttcaaccggtcacggttttttgcgcgagccgaatgatattgcaagttattccgctttagcttgtattgcgatacagtcaaaccaaaatgaccagcatggtggacaaagtatacctaactttgatttttgtatggctccgggagttgcaaaaacctacaagaagaaatttatttcaaatctatcttctgctcttgcaatgcttagcggcgacgaaaatgcaaaagacactgctaaacaaatcgtttccgacataaaatctgagcagaaaattgagccgacattagccggttccgcagagtatggagaaattctgcttaagaagcttgaagaaaagatgagtaatgagtctgctaaaagagcggttaaatttatagtagaaaattctgtaaaggagactgacagggcaacttatcaagctatggaagctttaatccataacctcaatacaatgcactccagagcgggagcgcagattcctttcagttctcttaattatggcaccgatacttccgaagagggccgtatggttatgaaaaatctgttgttggcggaggaagcaggtcttggaaatggtgaaacgcctatttttccgattcatattttcaaagtaaaagaaggtataaactttaataaagaagatattaattacgacctgtttaaattagcctgtcgtgtatctgccaaacgattattccctaactttagtttccttgacgctccttttaatcttcaatattataaagaggggcatcctgagactgaagcaacatatatgggctgcagaacgagagttgttgccaactgctatgacaaatcaagagagataacatatggcagaggaaacctgagttttacctcgataaatttgccgcgtattgctattaatgccaacggcagtatagattggttttttgatgagctcgacagaaagattgatttggtaatcgaccagcttttggcaagatataaggttcaggctgcaaaaaccgtaaaaaactatccgtttttaatgggccaggggatatggctggattctgaaaagcttggtcccaatgatactgtgggtgaagttcttaaacatggaactttgacagccggatttattggacttgcagaatgtttgaaagcgcttaccggtaaacatcacggagaatctcagcgctctcagaatttaggtcttgaaattgttgggcatatgcgcaaaagaatggatgaagccacagaaaagtatggaatgaacttttcattgatagcaacgccggcggaaggcctttcaggcagatttgtcaacattgacagagaaaaattcggtgttatagaaggggtaactgacagagaatattatacaaattcattccatattcctgtatattatcctatcagcgcatatgagaaaataagattggaagctccatatcatccattaacaaatggaggacatatatcttatattgaacttgacggcgaccccacaacaaatgtagaagcatttgaaaatgttatccgatttatgaaagaatgcggtataggatacggcagtatcaatcaccctgttgaccgtgacccggtgtgcggatataccggaattataaacgatgaatgtcctaagtgcggcagaagtgcgcttgatactgatgaaaacggtgaagttattggtatagaaagaataagaagagtaacaggttatttggcaggtacattggataggtttaatgacgctaaaaaggctgaggtcagagatagggtaaaacacatgagtattaatgacccggacactccaatggaacagctgtagattagagatgtatgtgttcttatgaataatataatattaagtgaaaatggtagattaattttcccgtataaaagagatattaatttaaaggtaataaatatagtaaagactaagtcttgcaatgaataatataaaaggccttgtattgaaccgaccccaaaaagttagaccgaaaatctaacgactaggaggtcggttttttatagcaaaatatagtttgaattaaaaaagaaaatagttcaggaatattcaaatgggagcgttggatacaagtttttagcaaacaaatatagtatctctgcaaaaagttatgtggaaaaatgggtagatatgcttatgaaaaatttggcggtgtgcaaaaaactaatgctttaaaacattccaccaatgcgtgaagaggctgatttttggtctcaatgggatttgggatgttttaactccattagtcagtctcgctggcagcttcttcgattgagtgagtcattcttttttgcttaaatttttctcgaaaatcacttttctaaaaatttaaggcatgtattcataagcgaatacatgccttttttatatttacgtagaataaaattttaaattaaaaagcggtcatcaatattaaaaaatctcagcaaccaaactgcaatgcaaataaatcatgtgtttgagtaatagtcttgaacaactgctcctgctttagttcaacaaaaacaccggatttgcacaaatatacagcaatattgatgaccattacaaagacttttgtctttgagctattttataataattaataaatataatttgtggcgagcagaaggaatggtccaacacctttacagtcgttctcggtaatcggctcgctgaagtaataatcaaggcttccgtcacgtctgtgattgtcatccggtcctaaaccggcaacagcacagcagtttttaagataagcatagtcgccgtcaattcttataaattcgttaaaaattccgtcaacagcttttaagagataaggtttataagtttcttcatcaatatatcccatttttatagctttgttcatagaataagcaaacatgcagctgcaagtggattccttataattatcgctgcgtctgttgtcaagaacctgataccaaacgccgctttcatcctgatatttaacaacatttgaaataaccttgttatacatatcaattagagtttgtcttccgggatggtcttcaggcataaagtcaagaacatcaacaatagccatacagaaccaaccgcatgaacggccccaaacattgagtgaacgtccggtagccttatctgcccaaaaggctgattttgattcgtcgcaagcatgtgcatataagccgcagcgcggttcgtaagtagctttctccgcaatcacaaactgttttactatatcatcaaaattttcaggatggttgcactcttttgcatattgagcacagaacggttcacccataaataatccgtcaagccatatttgattaggataaatcaacttgtggaaatacgcgcccgattccgttctaggatgggttttgagctgtgactttaataactcaacggccttgatgtatttttcttcgcctgttttattgtagagccaaaagcagtcttttccgttatttatatggtctatgttatatactgttggattatatgtatttatagttccgtcttcgttgataaaatagtccatactctctttgatataatcaaaatatttactgtcgtttgtttcttcatataccgagccaattccaagcaaggtaagtccacagtcatactgccattttttacttattataggtgaattatctttcatgacagtatccgccatttttttagctgtttctaaaaatctttgcttactcaatataaaaacctccaagagaaaatatataattctttccaatgggtattttataacaacgatatgaaatagacaagaaatttattgtaagacaactgaaaaaatgttataaataacaaaatttcagtgtacaaaattaaaatcttgatatataattattcataatactgagagccgaaatctattatatgtagttattagtattataaaatacatagaatagcggcgaaaatataatattgaatttgaggtgttaacatgtttaataagttaaattttggaatgagaggtcatgatactaaggcaactgatattgagagcctggcaaaaatccttgaagaggccggcgctgctcacgttcagctggctttaaaaaagtcttttaaagatataaattggcagaatagtatccttaccccggaactcgggtgctatatcaaaaacactcttgcggaacacggagtcagagtgtcggttttggggtgttacataaacccggttcatccggatgaagctaaaagaaaagaagaagttgagtggtttaaagctcatctgaaatttgctaaatatttaggctgtgatatggttggaacagaaacagggttttataatacattcgaagaaactcatacagaagagaattatcagcgattctttaaaagtatgcgcgaaatagttgactgtgctgaaaacttaggaagtattgtcggggtagagactgtaacaaaacatagtatgtttaaccctaaaatgacaaagagattccttgacgaaatagattctccgaatgttactattatatatgatcctgtaaatatttcagatatgaatgatagggatgaacagcataaaatagttgatgaagtatacggtctatacggtgataggataggtattcttcattttaaagattatgaagtaatagacggaagaaaagaaggaagactggctggagacggcgtttttgattatgagtatctgtttaagtatgctaaaaaatatactccggtgattaatgcgatattagagacaaatagtgaggataattttaaaaatacggcagagaaaattttaagtatatgggatagtactgttactgagtaaataagaatttataaggtgaatatatagtgatatataataatgttgtatcaggcaggtttgtttcaagaccaaatagatttattgcaattgttgatgttgacggagctgaacagatgtgtcatgtgaaaaatacaggaaggtgtcgggagctgcttgttcccggcgcatctgtttttttggaggtatcttcaaatcctaaccgaaagactaagtatgatttgatttctgtatataagggtgacaatttgataaatatagacagtcaagctcccaataaggtttttaatgaatggcttaacgaaaacaatttatttaatgatattaagttagtaaaaccggaggcaaaatatggaacgtcaaggtttgatttttatattgaagcagacggcaaaaaaatatttgctgagacaaaaggggttacgcttgaagaaaatggtgcagcgatgtttccggacgcaccaaccgagagaggaagaaaacatcttatggaattaagtgattctgtaagagacggatatgacgcttatgttgtattcattatacaaatgtccggtgttaaggtttttaaacctaatataagaacagatttaacttttgcaaaggatttgaagaaagtatctgaatccggagtaaaaattattgcttttgacagcatggtaacagaaattagtttgaaaataaacgattatattcctgttttgcttgattaaataagtgttttattatattactcacttattgtttatattgcacaattaattagatattaatatttatttttgtgatttaaaatattattatttttatatggcaagaatacagtaatatttttggatttttagaaatatatatagtattttgcagtaattttattttcttttttataaaaatatacatatgtctgtttagagctaaaaagtggcggtataacgtagatttttggccttagaatttttgaatattttttattaaaaatcttgacaaaataggaatacgggtgtataataaaaccaagataagggaagtaaatataaagcttaccaatcttaaagctcaccaatcttaaagctcacacatactaagtcaaattttgatactggtatgataaactgtttaaagatgatttttatagtaatgagctgatttaagattttcatttgtttattattttgtttcttttgtatttgtttatgtattgaaatgaaatttaaacacagacttttcagaagagaaatgaaaagttgaattcaaatctaatatattattttggttgaggatttggactttggtttagaaactatttgtcggctgcgtcttgtaatattttgagtttaatgtattactaaatggctgacttagaaatttaaattaatattaatgttgattaggaaaatcttaaaaagatggaatgatttttatatttctttatttatcgatctcatagatttatcaggaacaagagcaaatgaattttttatagctcttatatggtttccgcgaactcgcattaaactggaagttttaccgagtttatgatgaggatgtaagtttaaaaatgaaagttttaactaacaatgcagagaagttttgatgatgtgtgtttaatagttttataaaaattgttttgatacttgaattaaaatgtaatgctgaaagattttaataagttgataaaaaggttaaagatttattattatgttagtttataaacttttcgttattaattaaactttatatcggaacaaagctgtgataaatcgtatggggagttaaaaacacaaagcacggctatttataaaagtggctgttacggaggtgatgcgatgtgtggatgactcaagaagagtcagttgattcacagattgacgcactcgtatttatctcaatagatgaatacgagcaagcataacagttaagcacgcttgtagaggatgagtatttggactcgtaaatatgtttatttaactattggtcgcttgagcaagtgcgagggctccgaaagagtttgaaataaacaaatagtttgacaagtcggattgcttaatatgtcttggctgcgtcaattaactcacagattgctggcaatgattgtttgaaaagtattatttgaagttttcgtcgatgtatttagatatttggaagatgttgattgctgtaggggcagcaatggaagttaaatctaaagcatataggacgcagagttttgagctttgtcagtggatatgatgagtgtgatgaaaatgacaacaaagggtggctgtttagccaccctttttctattctactatttctaattttgagattgaaacttcgtatgcggttttattgactacttctgtttcgcttatatgtttttgatattcccggctctgtattcttccccaaacttttatatttgtacccacagacagcgactgtacatattttgcgtttctgccccatgcgatgcacggtatgtaatcagattttttgtatgaacggtttacggcgagcaatacgtcagatatttcgcggttaaatggggttgttctataggttggatctttgcaaataaacccgtttaagtatatttgatttgggtttacgttggacatagattttgacttttcaaaatcttcttcgtcagcttctgaaatataaagtatttctttaacaaaaactgttaatataagcctgtttccgatgccggaataattattataagaacggtattgacctataatcttaacatggtcgttaggtgtaggataatattcaccgaataggcgttctgatatagttatgggtatatagtccattttttcactgagcctgctgacggccagctgagtagaatagtatttttctccgtagatttcatgtgacagttcaggcggtgaaattatttttcccaccagtgtgacaatattattgtcatagtagctgctttcggtgaatgtgctttcagacattgttgttgacctccgatttttcattatttgtgctgtactgcattccgtttgcatcaatttgataattatcttttattattaattccgatataggaactatttcataaccttgtgatattaagtcatctaaaattttaggcagtgcttccggcgtgtgcttagccgcattatggaataatacaatagcgcccggtttgactttaggaactactcttttatatatttcatcagcgcttaaatctttccagtcaaggctgtcaatactccattggattgtgtaatagccacactctctagctgttttaacaacttcattattgtagtctccgtatggcggtctgaagagatttggtcttctgcctgttattgcctcgattttgtttgcacagtcgtcaagttcagctttcattttgtcggttgatatttgagtcatatgcggatgttttgatgaatgattcataacctcgtgtcctgcgtctgataaggattttacagaatcaggatatttatccacccaatcgccaacaacaaaaaaagtagttttaacatttctttctccaagaatgttcttaagtgtttccgtatcagagttatcccaggcagcatcaaatgaaatggcaatttttttgtcattttcatctttttcaacgcagtatattggtaagtctcggtcgctagggcttgcagcgcttatggctgcagaatttttattgatatgtccaaataaaattaatgcaaaaaatagaattacgatagcgcccaaggcgataccagtttttttaccgacgaaccatatcctcattttgtcgcacctcctgaagtaattttatgttggtatagtgcgatatattctaatatttatcttgcattttttaatatgtatggtaaaatattatttattagttttatatgtgagagattgaaggtttattagataaaaaagtattttataaaaatatagaaactaaagaaaggtataacagagttatgataaaatttatttgctatccaaaatgttcaacatgtaaaaaggcagagaaatggcttaatgaaaatggagttaattttactgttagagatataaaagaaaataatccaagttttgatgaattaaaagaatggtatgacatgagcggactggagctaaaaaagtttttcaacaccagcggaatgctgtaccgttctatgggattaaaagataagttaaataatatgtctgaagaagaacagttaaaacttttgtcaacagacggtatgcttgtaaaacgccctattgttataaaaggtaataaggttttaataggctttaaagaaaaggaatgggaaaatgttttaaaataatatataaataatattaataatgtatcagtcaacaacaatcaatccaagcagttttgacagctctgctgcttgataactgttaactttagcgcctgacaattcctttgcattgtctgacataatgatattttggagtattgaatttgaaaagtccagccctgcaagacaggtttgaaagaattcagtgcgcacaaatttagactcttttatctccgtattcttaaatgaacaatctgagaaaaaagtgtctgacatatcgcagtcgtttattatgatgttgttaaagacggaacggttaaagttagaatatttggttgttgtttgataaagacaggcgttattaaaattactgtttttaaaatcggtgcttatatattgtgagttttcaaaagagcattgtttataccatccgtttgataaatttgaatttttaaacaggcatttataaaatttaacattattaaagctgcagtctttaagattacaatttataaacgtacagttctcaaatattgtatttttgaaatacaagtcttccatatcaatgtctgtacagcatccgttttcaatatgtatatttgatatatcatcagcgttatcattctgaatgtgaatatattcaacaatatcgtcacattcctgcgcctggaaattcaaagtaaaaccaatgggctttttcatattaatctgcctttcaaataaaaataaaatataaataactgactttttaagtataattcaagttaatgtgttagacaaggtaaaagattgtgttatttaaacaaatatttttgtattatttaggaggatttaaattgcacagagaagcatataaacgtaatattagaatgggcagacaaaactatggacaaatcttttgtactcaatgcggagaacggattggacatgtaattagtaaagactataaatatttatatcttgtgtttatatgcaaatgcggatgtgaagttgtatatcaaacaaagtatgaaaatccggataatacgcaaaattattttatagagcttaaaaatggtattgcatcgtgccggcgctgtggaaaagaattattttatattgataaaagaaaaatcattaattgtggctttcatgttatatgtgattgcggcaagcaatataatatttctctttccaaagtcagtgatttaaaatagctattattcaaagtttcaaggtaggagagtatatgaaaaaaattgcaattggcattgtggctcatgtagattcaggtaaaactacgctttcagaaggcctattatatcaggcgggcgaaataagaaaattaggacgggttgatcatcgcaatgcatttttggatacacacccgattgagcgtgacagaggaataactatttttcttaagcaagccgtatttaacattaatgatactgaattcaccctgcttgatacccctgggcatgtggacttttcaaccgagatggaaagaacccttcaggttcttgattatgctattttagtaatcagcggctctgatggggttcaaagtcatacagaaaccttgtggaagctgcttaaaagatacgaaataccatgttttttgtttattaataagatggatattgctgaaagcagccatagagatataattctgaatttaagagataaactggacgatggctgtgttgatttctcgtctgattttggctcagaagctttttatgacaatatagcaatgtgcagtgagaaattaatggagcagtatctaaatatgggagaaattaaggaatctgatattcaggaggctatatcagaacgctgtatttttccatgtttctttggatcagcgcttaagctgagtggtgtggatgagtttttaagaggattagataagtatacaaaaagtataaattataaaagtgattttgcggcaaaagtttttaaaatatcagacgacggcaacggtaaccgtttaactcatttaaaaattacaggcggaactttaaaggtaaagcagcttctggacggaacaacatctgatggagaaaactggtcagaaaaagtggaccaaataaggatatattcaggaacaaagtttcatgcagctgaacaagttaaggccggaacaatctgcgctgtgaccggtcttggaaacacttatccgggagaggggctgggagatgaagagaattctcaatctgctctattaacgcctgttctttcttataaagttgaattgctttctgatattgacttgcataacgctctttcaaacttgagaaagatcgaagaagaagagccgcagctttatgttatgtggaatgaacagcttcaggaaatacacatacaacttatgggcgaggtacagcttgaggttttgaagcaaatagtttttgacagatttggaatgaaaattgactttgtaagaggaaatatagcgtatcgtgaaacaattgcggaacagactgaaggcgttggtcattatgaacctctcagacattatgcagaggtgcatttgcttcttcagccgggaaagcggggcagcggaataaagtattataataagtgcaatgaagataaactggataaaaattggcaaaaactgattatgacgcatttaaaagaaaagactcatataggtgtattaaccggttccccaatcactgatataaaaattacactagtggccggacgggctcatcaaaaacatactgaaggcggagatttcaggcaggcaacgtatagggctgtcagacagggcttaaaaatgactaagaacattctcctggaaccttggtatgagtttaaattagaagttccgactgattcgataggcagagcaatgacggatatacagcagatgggaggaagattttcacagccggagaataatggcgttgatatgacagtaatttcaggatctgcgccggtgtccgggatgatggattatcaaagtgaagtcagtatgtatacaaaaggcagaggaagacttacatgtttgccaaacggctatgagccatgtaataattccgatgaagtcattgaaaaaatcggatatgacagtgaaagagatattgaaaatactgctgattctgtattttgttctcatggagcgggatttgttgtgaaatggaatgaagttcgggattatatgcatgttgacagtggttttgatatagatggtttacaaaaagaaattgatgtttcagagaaaaggacatcagaatatatcagcagtgttgtaactgataaagaattaatgaaaatatttgaaaacacttacggacctataaaacgggatacctattctgcgttatatacaaaaaagtctcatgttaacaacaataagccgataaagaataaacctaaaaaagaacagggcgaggattatctattagttgacggatacaatattatatatgcttgggataatttgaaagaatatgctgatgaaaatttagatatggctaggcacaagcttataaatattttgtgtaactatcagggattttgcaagtgtcaggtaatattagtgtttgacgcttataaggtcaaaaataacccgggcgaaattgaaaaatatcacaatataaatattgtttataccaaagaaaaggaaactgccgatatgtatattgagaaggtatctcatcagctaagtaaaaaacatagagttagagtagcgacttctgacggactggaacagttaataatccttgggaacggtgcatatagggtgtcggcaaatgagtttaaaaaagaggttgatatggttgaaaaggcaatacgcgaattcttaaaaaatgatataaaatagctggataaacggttaagataccgtcttataaaaatagtatgatattaaaagacactgtaatcaaattttaattggttacagtgttttttatatactgattttttattatagcttttaccacaatcttagtgaactgttttgaattaatctcccaaatactatcttgccggtatttgtatatgtaaataatatattccttaaaggcttctagcacaaattacttatataatcatataatatatcaggcttgagatgtcaatttttgacgaaacaaaatattaattaattattcgagccaactaatttgaaaggaatgattttatgccatttgcaaatgaaaccgtgcctcttgaaatgccgcttgttggctatgcctatgtgcctatgcagcaggccgaaatgagaaatttgtttgatcctgagtacggtcttaaggaaggaactatattccctattttaaataaacctatgggtgtgtatggaaagcaaacaaaaggcgacataatttttaaaaatggaggaatgtaatatgaatgcgagagaagagttattaaaaaaattatccgcctatagctttgcggaaaaagaatggaacctatatttggatactcatccaaatgatagagatggccttatgatgcacagaagaatggctgataaggcaaaggaattaagtaaagagtttgaggaaaagtttggtcctttaactactatgaatgtgactaacacagaatgttttgattggattgaagaaccatggccgtgggataatgtttgataactatattcaggcatgacaaaaaagccaatgacaatatttatttaattacttttataaaaataattgtttaacttaacacataatctggagggaagaatatatgtggaattatcaaaaaaaattacaatatccagtaaatataaaaactacgaatcctagccttgctaactatattgtaagccaatacggcggtcctaattgctttttataataaattaataatatataatttctagatgcttttccggtttaatataaattatttttgcaacaatttgttttaatgcgttatttttatcgtcgtctgaaatatctttatcctgaataaaatctaaaatatcttttgtctgtttaatatatttatgattatctgctatatcgcaaattgaattattttgtatttctttaagttcgttttgcagttttattttgtttttactatattcttctaaagtgtctgttcccgagagatatgcttctttagctctgtctaatgatttttttaagcgtttttcagcttttttatataacaatacttcatcattattttttgtatttgcgttttttattatctgagctgattctgcttttaaacagtctgctttcaattgttctataactattttttcagcagtttttatacttattgaatgtgagacattgcaagcggacttaatatatccgcagcactgcaaataatctccgcttcgtgcgagtgtacagccgcagctgccgcaaaccaacagaccgctgagccagtatgacttgtcagcttggtctttcaaatgtttgcggttaatagtttttattttattataacgtttctgtgccttaatccataagtctttttcaacaataggttcatgttgattttctaaataaatagtgtcattaatattttcggattttcggttatgagtccatcttaaagttccggtatatactggattggatattatatattcgatagttcttttcctaaaaggatttccaagtttagtgcgtaacccaagtgaatttaaacgagctgcaatttgtccgaatgactcacccgaaacaaatctttgaaatatattttttactataacagcttcttcagcaataggtgaaaaattattgtcaacaaccgtatatccgaaagatggttttgtttgtacgccgccttttttcgctttttcgctcatccccttttttacttcgtcagaaagattgagagaataatattcagccatggcttcaagcattgactctataattacactcattttgtcatcgccgatattttctgttattgataatacctgaatgcctagctcagaccttaataaagatttatatacaacactgtcttctcggtttctggcaaagcggtcgaatttatgtactaaaattacatcaaatggttttggggttgatttagccttttttatcatattttgaaatgcagggcgtttttttgcattgcggccgctgattccttcatcaatataaataaactcatccggcagcaataagtcgttttcgtcacaatactttctcatagcccgaagctgagcgtctggggaaaactccaattggtcttcagttgatactcgaatatagcaagctgctgttttcataaattcacctgattcatagtattctgttagatataataaaaagaagattattcaaataatatatacaagtacactataaagaatatgacggttttgtatctagcaatcataatacattaaaaaatatataaaaaatccattttagataacacaaaaattcagattagattagagcttatatttctgtaaaaaatattgtatttaattaagtcaatatgaactttataaatttgttttttataaaaatatagattttagagttatattggataagcagttataagtatattttttaacagaggtggttttatgaaagaaaatggaataaaaaataatgatatttcaaacagaaaaaaatggaatataaagccatggtctgcaagttcatcagtaatattgtctgatggcagtactagaccatatgattatagtatagattttattgaacatattgcctgtcctctttctgaatacgtgagcaatggattacagaaagcagtttggaaacccgagtataatacgtatatagaaaataataatataaagtgtatagtggataaatagaactaattataatatatatattattagtgtttattgcaaaaaaataagttgaaattataaaatgagtatattatataaaatagatatatcaatttctaaaaattgcagtaaaatttagttacaaaatatataatttgagcaatacatttccttttgaaatgttgagaattttgataaaatatcctatattttgtcagtttaagaataaaagacaaagaaggatatttaaaataggtgttacatttagttttttgggagtgatatatttgcatagggaagcatacagacgtaatattagaatcggaagacaaaattatggtcaagttttttgtactcaatgcggcgaacgtttaggacgaataatattgagagattataaatatttgtttttagtttatttatgtaaatgcggagctgaggttgtttataggacagaagaaggcaatcctgatacaacagaaaattattatatagatattataaatggagtggctgtttgcagacggtgtaaaaaggagctgttttacatagatagaaataaagtagtaaattatgcgtttcatattatttgcagctgtggaaaacaatataataatagattgcccgaaagaagcagacaactaaggataaaagaaggataaagatttatataagatttattatataatacaattaggcggtcctaatggcgaacttgcagcatcgctcagatatttatcacagcgttttgccatgccaaacggtatgacaaaggctttgcttacggatattggaaccgaggagcttgcacacttagaaattgttggaaccctggtgaggcagttagctaaaaatgcaagtgataaagaaattgctgccagtcctttaggcgcttatttcatgaatcacggaaggtcagtttatccggctgacgccacaggagtgccatttgatgcaatggctatagcttcaacaggcgatcctataggagacttaaccgaggatttggctgctgagcaaaaagcaagggttgtgtatgataatattttgaaagtatcagacgaccctgatgtaaacgatgttataaaattcctgcgtcaaagggaaatagtgcattttcaaagatttggagaagccctggatcaaattcaaaatagaccggcaacaaaaatgtactgcggagtagaaaaatagacatagtggattaatattttatttataagtaaagtgtttatttcgggatacctgttttgggtatcctttttttattaatttaaaatgttgacattttaatattttagtgtataatcatagttataaattgttaggagtgatgaaatgggaaagataatgatgagaaagtttttttcctgtactgctttgcttttgagtttgatattaattatcggcgctttgacatcatgcggcggcaacactgaagaggcaagacaggaagctgaacaagctttttcaaaaaccatggaggcatttaaatccggtaatgttgagcagataaaaaactactgtgattcagttgagataaatgataatactgatttaagagctgcaatcctgtcatcgttaaagaatgtgacgtatgatattaattctgttactgcgtcaagtgcaaaaaaggctgttgttaatgcagatattactcttattgacgcgtctcaagtaatgcagaaatatatagaaaatattgctgcgatggtctcaagtccggaatatcagaataatcttgctacaatgacaaaagaggattatcaaaaacttatggacgaccagcttgcaaatgtgctggagaacggcggagttcctaatgttacgaaaactattgatgtaaatatgaaaaaagagggcggaagctggaaagtagatggttctgcactgcctgaacttcttgttacaaacactttgaatgcgatagagcagataaaacaatagataatacggttatataattttatttggccgtgttattatttgtgtacagaaaatatgtataaattttctaaatatataatttacgcaggtatacacgccaaattttatgggtgaatgcctgctttttgtttacagtttttaatcatatagttacattatttaaatatataagcctatgaacttttatttagtgtaacaaaactcttgcaataaaatttgtttggagttataatataccagtatgtgtttaaatttagaaacagtttgtttaacatataacataaatggtatggaaattacaaagtataaattatagatttattatattaattttgaaaataatatgagattttggaggtatcctttatgggtataaaagggataattgagaaagtaataggaacatacagcgacagagaattgaaaaaaatctatcctattgttgataaggtcctcgaacaagaacctgttatggaaaaaaagagcgatactgaacttaaagctatgactgaagtttttaaaaaacgtttaagtaacggagaaacacttgatgacattcttcctgaagcctttgcggtttgccgtgaagctgcctggagagttttgggaatgaagcatttccctgttcaagttgtcggcggcgttgttcttcaccaaggcagaatagctgaaatgaaaacgggtgaaggaaaaactttggttgctactctcccggcctatttaaacgctcttgaaggcaaaggcgttcatattgtaacggtcaatgactatttggcaaagcgtgacagtgagtggatggggaaactatacagttttctagggttaagcgttggcttaattattcatgatatggacaatgctgaacgtaagagagcttattcggctgatattacctatggaacaaataacgaaatgggctttgactatttgcgtgataacatggtgatatataaagagaataaggttcaaagaggacataattatgcaattgtcgatgaggttgacagcatattaattgatgaagccagaacgccgttgattatttcaggaatgggtgataagtcaactgatttgtatgctcaagcggacaggtttgcaaagactttaaaattcaaaaaggtagttgaaacagactcaaaggttgaggtagaagacgaagatgaacttaacgaatatgattatattgtagatgaaaaagctaaaactgcaatgctgacaccgcgaggcgttaaaaaggcagaagaagcttttcatgttgaaaatttaaccgacccggcaaatatgactttgtctcatcatattaaccaggctatcaaagctattggtgtaatgaaaaaggataaggactatgttgtaaaagacggagaagttattatagtagatgagtttaccggacgtatgatgttcggtaggagatataatgacggtttgcatcaggctattgaagcaaaggaaggcgtaactgtagaaaatgagtcaaaaacattggctactattactttccagaattatttcagattatataagaaattatcaggtatgaccggtacggcacagacagaggaagaagagttccaggaaatatataagcttgatgttattgttataccgacaaacaggcctctgcaaagggaagatgagcatgacagcgtttataaaacagaagacgctaagtttaacgccgttataaatgacgcggctgcggctcacgaaaagggtcagcctgtactaataggtacggtgtcaatcgaaaaatccgaaaaacttagtaaaatgctcagaaagcgcggaataaaacataatgtcttaaatgctaagttccatgataaagaggcagaaatagttgcacaggccggtaaaaaaggagcggtaacaatcgctacgaatatggccggacgtggtacggatattgtactgggcggaaatgccgagtttatggctaagcatgagatggaaaagatgggattttcagaggagcttattaaccaggcaactggttttgccgaaacagatgaccaggaaattatagaagcacgcagaacatttaaagaattaaacgatagatttaaatctgaaatagaaccggaacaaaaggaagttcttgaagccggcggtttaaatattatgggtactgaaagacacgaaagcaggcgtattgataaccagcttcgcggccgttcaggacgtcagggagatataggtaaatctaaattttatatttcacttgaagatgacctaatgcgcttgttcgcgccggagcgtatttctaaagttatgaatacgctgggacttgaagacgatgacgcgattgagagcaaaatgctcagcggagctattgaaactgctcaggagcgagttgagggaaagaactttgatatcagaaaaaatgtccttcagtttgacgatgtaaataatcagcagagagagattatttataaacagcgtgaccaagttttagacggcgaagatttaagagacagcatcatgaaaatgatgaaggacgtattcagtggtgtaattggtctatatataggcgacaagggaaatactcctgaagaatgggattgggaaggcttaaaagaccatcttgaaaccatacttggtgaaatgccggaagatttcctgaaattcactgatgttgaaattgacaaaatgactcaggacagactgactgattacgtaatggaagacgccgagaaaaaatatgctgagaaagaagaaatgttcggcgacgctatgcgtgaagttgagcgtataatattgctccgtgttgttgaccagaagtggatggatcatattgataatatggaacagcttcgtcagggtattttcctgcgcgcatatgctcagcatgaccctgtaatcgaatataagtttgaagctatggatatgtttgaagagatgacagaatccattaaagaggatacaataaagcatttgttccatgtaatacctcagtcaaagatagagagacagcaggtagcaaaaccgattgctgaaaatgcaggcggagatggaactgttaaaaagaagccgataagaagggttacaaagataggcagaaacgatccttgcccatgcggttcaggtaaaaagtataagaactgttgtcttgataaggaccgtgagaatggaaatatataactatatatctatataaataaattttattgaggtgataaagtgatagcgtttgatgagtttaagttagggctcgagagcatggaaaaagatattactgaattgagggattcactttaacttgtccgcagttgaatgtgaaataggagaacttgaaaaagtatcttttgagccggatttctatgaagatatggataaagccggaaagatactgcagaaaataaaattgctgaaaaacaaggttcagggatttaatgacattaaaaaccagtgggaggatgtttctaccctcgtggaactgggaattgaagagaatgacgacagcgtattgggtgaagtaaagtccggatatagcgaacttcaggaaaaaatagacaatatgaagcttgatacactgctctccggtaaatatgataaattaagcgctattattactctccattcgggagcaggcggaactgaagcccaggattggtgcgaaatgctttacagaatgtacaatatgtgggcggagagaaaaggttttaaaaccgaggtaattgattatcttgacggtgaagaagccggtataaaaagcgtgacattttccattgagggactgaatgcgtatggatatataaaatctgaaaagggcgtccatcgccttgttagaatttcacctttcgattcagccgccagacgtcatacttcttttgcttcctgtgaagtaataccggaacttgacgaggagttggacgtagagataaatcctgaggatttgagaatagatacctatcgctccagcggcgccggcggtcagcatataaataaaactgaatccgctataagaataacacatttgccgacaggtattgtggtcacatgtcagaatgaaagaagccagcataaaaataaagaaactgctatgaaagttttaaaatcaaagcttgtcgagattgctgagagggaacagaaagacaaaattgacgatttaaagggtgtacagacagaaattgcatggggaaatcaaatccgttcatacgtttttcatccttacagcatggttaaggaccatagaacaaactatgagacaggtaatataaacgctgttatgaacggtgatattgacggatttattaacgcgtatcttaaagcaaaatcaaaaggtgagatataattaaaactatgaggagaataagatgtttgaaaaactatcatttttagaagaacagtttgaagagctggcaaaaaagataagtgacccggaggtcatcgcagaccaggagacttggcgtaaattatgtaaggaacattccgaccttactccaattgttgaaaagtacagagaatataaaaaaaatatggaaacaattgaagacgctaacgcattaatggatgaccctgatacagataaagaatttaaagagatgcttgttgatgaatcaaaaacagctaaagccaatattgaaaaaattgaagaagaattaaagatattgcttcttccaaaagatcctaatgatgataaaaacgttatggttgaaataagaggcggtgccggcggagatgaagcggcactgtttgctggagaccttttcagaatgtattcaatgtatgcggacagtaaaaagtggaaaatagaagttttgaatataagtgaaataggaatcggcggcattaaagaagtgacgtttatgattaatggtgaaggagcttacagccgacttaagtttgaaagcggagttcatagggttcaaagagtgcccgaaactgaatcgagcggcagaattcatacttcaaccgttacggttgctgttttgcctgaagttgatgatgtagaggttgagataaacccggatgatttggaaattgatacttatcgttcgagcggcgccggcggacagcatatcaacaagactgaatcagcgataagaattactcacaaacctacaggaatagtggttacatgccaggatgaaagaagccagcataaaaatagggaagcggcaatgaaaatgcttcgttcaagactatatgataaaatggagcaggagcggagcgccgctatagctgctgacagaaagagccaggttggaaccggtgacagaagcgaacgtatcagaacatataattttcctcagggcagaatgacagaccatcgtattggtttgactttgtatagactggaacagataatgaacggtgatttagatgagattattgacgctttaattacaactgaccaaagtgaaaagctgaagtctcaagctgagggaaatatataattaattcaggtgttgtttatggaaactaaattattatcaaatagtgagaatgatttgaatattgcagctgagataattcggtcgggaggaactgttgttttcccgaccgaaacagtatatgggctgggcgctgacgcgttaaatcctgatgcagtaaaaaaaatatttacggcaaaaggcaggccggctgacaatccgcttattgttcatatttatgatgttaagcagttgaacgagatagtaagtgaagttccggaatcggctaaaaaactaatgaataagttttggccgggaccgcttacaattatcttaaagaaaagcaacaaaattaggaatgaagtaacggccggacttgataccgtaggtgtaagaatgccggtacagtctgaagcaaagagacttttagaactttcaggagttcctattgccgcgcccagcgcaaatttgtcaggtaaaccaagtcccactgcgtttgcacattgtgtagacgatatgaacggaagggttgatgcaataattgacggcggcgactgtaatgttggtattgagtccacggttatagatttatcaggtgaacctattatatacagaccgggtgatgttacggctgaacaaattgaacagatactgaattgtaaagttaaaacagtatcggaagtaaaagaaaatgaaaagcccaaatctccaggtcttaaatataagcactattctccaaaagcagaggttatcattgttaaaggttcggttgaggaagtagtgaattgcgtaaacggtcagaaagacagatgcggtattctaatatttgacgagttttcttcagaactaaataaaaaaattagtcccaatatcgagattatctcgcttgggagtatgaagtctccgaaagaagcggcaagttctttatttaaagctttaagggaaatggacaaccgtggcgtgaagagagtttttgctcctgaaatcccaagtactgataaatggagcggtgttagaaacagattatacagagctgccggaaatagaatagttgacacaaaagattattttgaaaaatctagaattaatcctaatataaaatctgaaataaaagatattcataatattttatttgtttgcaccggaaatacctgccgaagccctatggctgaaggaatatttaacaatatggctgaaaatgaaaatttgaatgttagagcaagttctgccggtatctatgtatttccgggttcaaaagtgtcaaaaaactcagtggacgctttgagtgttgaaaacatagatatttcaaaacatcagcccaaacagttggattttcagttaataagtgacgctgatttagttttgacaatgtcattgtcacataagtcggcgataataaatgaatttcctgatttaaaaaataaggtttatacgattgcggaatttgttggagagaaaagtgacgtatctgatccttttggcggagatttgaatctttataagagctgtatgattgatataaaatccttgattgaaaaacttatattacgtataaaggctaatgaatagttatggatatgatatttaaacctatggatgaaagtcatattgacaggcttcttaagattgaggaagaatgtttcccgggagattcatggacaagattaatgtttgaaagtgaagtaaagaacaaaatttcttcatttattgttgctttgtcaaacgacgaagaagctattctgggatattgctgtgtttggttcattgcggattttgctgagataactaatattgctgtctctcctaagttttggagacagggaatcggtaaaactatattatattatataatagagaaatctaaaaaaaataaatgcaagtatataaacttagaagtaaaatcaacaaatattgcagctatatcgttatatgaaaaaatgggatttgtatcagttggtcaaagaaaaaagtattataaagataattctgacgctatattgatgacaaaggatttatagaaggtggtaaattatgaaaatattagctatagaaagttcatgtgatgaaactgcggcggctgtagtcgaagacggaactaatattttatctaacgttataaatactcagattgaattgcacaaactatatggtggtgtggtgcccgaaatcgcctcaagaaaacatattgaaaacataagcgctgttgttgataaagcgcttgatgactgcaatctgacttttgaggatattgacgctgttgcggtaacatatggcccggggcttgtgggagcgctgcttgttggcgtgtcatatgctaaggggttaagctattcgctggataaaccgctgattccggttcatcatattaaagggcatatatgcgccaattatttggaaaatcctgattttaagcctccttttatttgtttggtagcgtccgggggtcatagccatattatttatgttaaatcatattttgaatatgatgttatagcaaaaacaaatgatgatgcggcaggagaagcttttgataaagtgtcgcgcgttttaggttttggctatcccggaggacctcagatacaaaaagctgccgaatccggaaataaatatgcaataaattttccgcgtgttaatatgggaagtaatggatttgacttcagtttcagcggagtgaaaacatcagtattaaattatatacataatgctgagcaaaaagggattgagataaataaaaacgacatagcagcttcatttcagcaagcagtagttgacgtattgtcggatcaccttataaaagcggctgagcagtattgtgttgaccgtgtcgcattggccggaggagtggcgtctaatattccgttacgggaaactataagtgacaaagctgctgagaaaaaatttgagttttgttaccctaggcctatcctctgtacagacaatgctgcaatgataggatgcgcaggtttttatgagtatcaaaatggaaatattgccgacttgtcgctcaatgcttatgcaaatttagatatataaactttcgccctttaagggcgtttttttatttgaaaatataaacaaattttatatgatttctttgacaaatttatgtgattatgatatactaaaaataataattgatgtgttattttaagggggataatatgaaaaaatttagtgtgttttttagtgtattgtctgtaattgtggtgacaatattattatccgcctgtggaaatacaaagagtggaagaaataacatatatatagtagtggattcagttgaaaaggatagttttcttgaagaaacaaaaagcggagtaaacgatttttgcggtgataataattttaattttgaaagtttgacatgtaaaaatgaaagtgattttttaaataagctggactttgccggtgaaaatggttccttagtatgggcttgcggggcttatttttttgatgatgcaaaaaaagctgcggagtttaatacaaaatctaaatatgttgtacttgacagtccctctgatgataaaacaacaaatctgttcggcgttgtgttcagaactgaggaatcatcatttcttgtgggatatattgcagggatgaccactaatacaaatcaagtaggatttgtaggcggaataaatgacgataatatagcaacatttgaatatggctataaagccggtgttgagtttgcggctaaagaaagaaaaactaatattaatatatcttctgaatatgttggttcttatgtggatttagcaaaagctttttcaatcggcgatgaaatgtataaagccggtaatgatgtgatttatcaggccgcaggagctgccggacttggagttattgaatctgcggttcaaaatgacaggtgggttatcggcgttgatgtagatcagagtgagattgcgcccaaaaatgttcttacgtctgcgctgaaacattgcagagcaattgcaaaatatgtatctgaggatataattaaaaataattttaaaaacagcaataaaaacacatactattttggattggaaaatggttctgtagatataccgtcaaaccatgacaattattcagatgagttgtatgaaaaaacacagaacataaaacaaaaaataatttctgatgaaataattgttcctaagaataaagacgattatgagacatttaagaaggagttgcagtaaatgacaatatatttagatatgattcagtcattagcgctggctactggtctattgttctttggaaagtttgtaaaaagacgaatacatttttttcaaaaatactgcataccatctccggttatcggtggtctgattttttctgtattagtttttatatgtcatgagtttggctggttatatattaactttaacaccacattgcaagatttttttatgattgcattctttactacggttggttataatgcttcaataaagccattaaaacaaggcggaaagcatatatttatattccttgttcttattgcttgtttaattatctgccagaacattatcgctctgggaataggtaaattattgaatgttccgcctttgctttctctatgtacaggatccatacccatggttggcggccatggaagcgccggcgcttttggtcccactataaaagctatgggcgttgacggagccacatctgtggcaattgcttcagcaacctttggtttggttgctggcagcgccataggcggaccaatagctaaaagattgattgaaaagaaaaatctctataaagaagtagaacatagattggatgaccctgatatcgaggactcggtttccgggtttaaggagtttatagccagcggattttcatatggtttttatcagattgtaattgctatgggacttggtactttggtttcatatgttttgaaattgacaggattaaagtttccttcctatataggcgcaatgcttgtggcagctgcaattagaaactattctgatttcacagggaagtttaaagtttattttatggaaattcaggaaataggcgaagcttcattgtctttctttttatcgatggcattgatgacattagaactatggactttatcaaatttagcgctgccaatgttgattctgctcgcttcccagcttattttgatgatgttattttctcgttttgtaatttttaagtatatgggcaaggattatgacgctgctgtgatgacagcaggagcatgcggatttggtatgggagccactcctaatgctatggcgaatatgcagtctatagtagataaatatgctccgtcgccccaggcttttttagttgttccgatagttggagcgttgtttattgactttttaaatagtttaataattacaggttttatttcatttttttgatttatacaccaattttattttaggtttggggtgatatgatgactcgtttttttaaaataatatattctaataaattgttttgccttcttatgatgatagcacagctttctgtgcttttattgctcagcgcttggcttggtgattattctaaatatttttatacttttatgaattttctgagcgctgtattgattatatacgaaattaacagagaagaagaaccggggtttaaactgacatgggtaatgcttattgctattatacccattttcggaactttgctttatatatttctgcattataacagagcctcaaaaaaaattgctgttcacagtgacgaaataagaggccatactcttaaatatacaaaacaggagactgatgtcttacaaaaattttctgaaacttatcaagaggatataggtatatcaaaatatatatatgattattctgggtttccggtatataaaaattcgtcggcagagtatttttctttgggtgaccaaatgtttattgatttaaaagatgaactaaggaaagctgaaaagtttatttttatagaaatgtttataataaatttaaacggcagaatgtggcctgaaattttagaaatattgaaagaaaaagctaaggagggcgtagaagttagattaatgtatgacggaatgggatgtatgtctcttctgccaaatgattatgatgatacgattagaaaatttggtataaactgccgagtgtttgcgcctatagttccttttttttcaacatatcaaaataatagggatcacagaaaaattatcttaatagatggtaaaaccgtttatacaggaggcgttaactttgccgatgagtacataaatgaaagagaaagattcggccattggaaagataacgcgataaaaataacaggtgacgcggtatcaggatatacttccatgtttcttcagatgtggaatacttcaattaataaagttaaggaagataattatgataaatatataaattctgtttctgatggtgattttaaagaaggagacggatatattataccgtttgcggacagccccctgaaaaaggacaggtttggtgaaactatgtatattaataatcttaatcttgccaaagattatgttcacataatgacgccttatcttgttctgggtaccaatatgatgcaggcattaaagtttgcggcaaaacgcggcgttgatgttaagataatcctccctcatataccggacaagccttatgctttttggcttgcaggaacttattacagagaacttttgggggcaggagttaaaatatatgaatatacgcctggatttgttcactcaaaaatgtcaatttcagatgataagcgtgctataatcggaaccattaatcatgattatagaagcctttatcttcattatgagtgtgcggcttatttggttgatgtgcctcagattaaagatatggaaagtgattttgttcatacgctgagtttatgtgaagaagttactgaagatacaattaaaaacagaagcttggttaccagaatattgggcagagttataaggttgatagcgcctttgctatagattttatcaaatgagaatgttaattttatgacaaattgaatatcttgttatatttaaataatttattgttataaaatgaattttaaattgactttttaacttgttatatagtaggataaaaatataaattggaggtgtttgaattggcattaaatgtagttagcgaagcgagacgttgtctgaattgtaaaaagccaatgtgtatggaaggatgtccgataagcactgaaattccaaagatgatacaaatgtttttgaatggtgagatggaagaggcaggagaaatgctttttgataacaatccgttatcagttgtttgttctttggtatgttcgcatgaaaaacagtgtcagggtcattgtgtgcttggaagaaaaggaaatcctgtgcatattagcagtattgaaaattatatttccactacttatcttgaccgtctcaaatttgagaaaccagagagcaatggtaaaatggttggaatagttggttcaggtcctgcgggaattacgatcgccatagaacttgcaagaagaggttacgatgtaacaatttttgagtctaaagataaaataggcggggttcttaggtacggaattcctgaattcagacttccaaaaactattcttgaaaaatataaatcacttatgctcgagcttggtataaaaataaggccaaacgctactattggaggggctataagtattgaagatatatttagagacggatatgacgcattatttataggaaccggtgtttggaaaccgaatagtcttagaatcaaaggtgaaagtttaggaaatgtacactatgcaatagcttatttaattaatcctgacgagtacaatctcggtgataatcttataatcatcggagccggaaatgcggcgatggatgttgccagaacagctatccgcaagggtgttcgaaatgttacggtgtttaacagaagtgataaagttgccgcaagcgaccttgaatatgaatatgcaaagtttgacggagttgattttgaattttgtaagattccggtagagataaagccggacggtgttatttttaaagactctgttgtaaacgaagacggttcaatagaagaagttgaaggaagcgaaaaattatatccttctacctcagtaattatatcaatcagtcaaggcgctcaagaccaaatcctttcgagaaccaaaggtatagatacaaacaaaaagggtcttttggttacaaatgaatacggtgaaacaaccagagaggggatatttgcttccggagatgttgtaaaaggagcaaaaactgttgttgaagcggttaaatattcaaaattagtagccgacgccatggatgagtatatgcagggacttgataaatagcaaaatactattataggttatttttaagtatcatacagtttattgtaaaataattttaatgagtaaaaatataagttttattttcagttccaagaatactcttggaactgttttttgttggggtctttagacgtggaaaaaaaccttcggttctaccggaggaagataaaaagctttagcataagaaaaatctccatgatataatagtaaatggtttggcgaccgcattacaaaaaatatatcatggaggattttaataatgttaaagaagagcacaaatgaaataaagagcacagcacactcaaaatacaggtgtcaatatcacatagtatttgcaccgaaatatcggagaaaagaaatatatggtcagttgaaaagagatataggagaaatactccgaaagctttgtaaacaaaaaggagtagaaataatggaagcagaagcctgcctagaccatatacatatgcttgttagtatcccaccatatataagtatagcacagtttatgggatatctcaaggggaaaagttcattaatgatattcgatagacacgccaatttgaaatataagtatggttcaagaaatttttggtgtagaggatattatgttgatacagtgtggagaaataaaaaaataatatccgaatatatcaggaatcaacttgaggaggattatgcatcggatcaaataagcatgaaagagtatttaaacccgtttacgggtagcaagaataagtaggcaaaaaagacagccgcacgtgagcggctgcctgtgatagtaatgcggtgtcaaacttctgtgccccttacaggggttaagcctgtattagccccttataggggctgtgcaagccaccagtttactggtggtcttgactaaaaaatattatgttttaattatggttatagtttgtgttataaatataacatagagatttatgtaatttttatgataaaatatgtctatataataattttatgtcatatttgtatttagggagaggaattttatgtcaaaattacgttttagtattttatttttatcaatatttttttcgttttctttttgtactttttcttttgcagaaactgagtttaatgaagttaacgaacccaatgtatatttttcagatccggatttttcgggtgccatgctttcgtcagccgacagtaatgatataacaatagaaattgccggttcagacgagcttaacaggagtactttggatttaccggaagttgtgttggcacagacagaagctgatacgatagctcagagaaacggaacaggatataatacattggaagaagcacttgacggtgctgtaagcggcgataccgttgttctattaaaagattatgaacttacccgggacattactgtaccatcaggagtgttccttttattgtcctgtatggacggtgataccggttatgatacagaaacaggcttttgtcctgacggaactgatgtggctggaaaagagtcaaaatattgcacgcttactatacctcaaaatgtaactatgaatatcttaggcaaggttttaataaactcagtggttggacgcccgggaggcggcaactttgaccaaaatatttcagcaggatatgccgagataatattggacggcacaattgaggtcggtgcatatggaatgcttgactgctgcggatacatttcaggcaatggacaagtaaatgcaaacgcgtcgtctacagtctatgatttatatgttgttaagagctggagaggaggaagccaagcggcaactattactcttgacgaaggaatatatcctatgaacgagtatgaatgcagaaatattcaagtgcctgttaaaattgattcgcgtgctacatatgcaggaaccgtaaaaatgtatgcgggcggaggatataatcgaacaagatttccgcagtttgataaaaataatggtctagttagaataaatgacggcggttatgttataaaaactcttgataaagagtcgggacgttctacaatcgatatttatggcggtgctgaggcaagtcatagctctcttaatattgtaggcactgacctaagcacaaaagattatttatatccaattaacgggataatgacttttaatcttcataatggaaattatgtaattaatgatgattttaaatttttgaccggttctgagttaaatcttttagaatcttctacattaacaataaacggaggatatagggaggaaactccaacaactacgggtaaacgcggcacagttgtattttatgacgaattccatgatgttaaaaatcttgtaaatactgaatatcctgaacgtccggcggctaagtttgaactctatgccggagcagctgtaacggttgacagtggttgtgatttttcagctgacataaccggaagtcctgaatgttcggcggcggcgccggccaaagtagtgatatctgatggggcggttcttgatgtcacaactagagaggcaaatggatacagaccaagtgcaacatcaggaccggattcagttaaattgaattttgatactgaatttatatttgctgactcaacaaaacatttggggacaaaagccggtgaatatttgtattccggaacagtttggagcggaggcgatatagttcagacgggcagtgacggacagttgacaggaatggtaacacttgacggaaacaaatcaaatgagggagttagtgttacgctttcaaattcagaaaataattatacagcggttacagattctgacggaagatatacattcagtaatattgaatatggttcttatatattaaatattcaaaaattaaactttttaaattatagaaaatcagcaattgtaatatcaaattctaatattgtaaatatatctgaggtggttttaaacggcggagatttaaatagtgatggaaaggttacttcgtctgatctttcaatactacttggaaattatcaaaaatcaattgatattggcgatattaatggtgatggaatggttacgtcggctgatctttcgattttactcgcgaattatcaaagaagcgccatagctgaataagttgcttatgaataattaaattatataaataacgtgaatggtaaatatgaaaatctatggaggaataaaaatgaattgtaaaaaaggtattttaagtttggtattggctatagcgatgatattcagcgtatcgccgacatttgtatttgctgataataatttgtctgatacaaatatttctgacagtgttgataaaataaaaacagaagaaaacaatgaagaaattatagacagtagcagtgaagcagagctggctgacgtgacagtgccggaagttgctctaaattggcaggaagcaggagttagggaatctgataataaacaaatatataagatagtatgtaatttatcagctcctgcaaacttgcagatggtggagacagtattaaactatgacgattctaagatacagccggtatatgcgattggtgatttatcaaatgatcaatacagtgatttattatatacagagccggatcaagataatagaataacagtgtcaggagcgctggaagtagcagcaaaagcaggcgcagcagtagcaaatgaattatatcatgcggatatagaaggaagaaaagcagtaagaatgacagcaggatggacaacgccgttatcgaaagcgattaattcatttgacttgatgagtttttattttaggttaaaggatggagtaacattagaagatttcgataaagagacaataacattacatccggtacagacatatacagaagaacagttgtcaacaggagaagattttggagtagaagtacgtatattcgaaagcagtccagcgtttgcatataaatactcggacgtacgtgaaagcggatattttgaatcgttgggcgacagcaatatacatgatttagcagtgacatttacatatccaaattctgataaagaaccggcaggagaagcaaaaactcccggtacagtaaagtgcgagaagaaacttgattttacttcaagtaaccctttgacagagcagcagcaaaaggactatggaatatattttgaagataacacagatggaagccatactttgacactttataatgcaaatattgaagtagctttggaagttgcaagatttggtcaagtgagcggaataataaatttgccggctaatacaaaagtaatattaatgggtgttaataatataaagaatactatcgctacatcttcaaatgcggcagcatctgttttcatgaaaggtgatggatttatatccagcgattctgctacaaatggtgaattaaatatgagcggcggaggatatggtatatattctgaatcttcttctgaaggagaagttaggtttgaaaatgctaaaattaatttttctgattctaattatacaagtggttcaggtatatttatatcatatgctaagcaaaatgtcatttttgataattctaatattacagttacaaatacaaaaggaaacggtcttgattttagcggaacggttacgtttagaaataattctaaaattaatgttaattcttccggtggagctgcaggtgtgaaggggaataaaagtattatttctgaaaatagtgaagttaatattaaaaatacattgaaaggctttgtgattacaaaggaatctattatattaactgattcaatagtaaatattgatttggatggatcttcatcttcatatgtgtatggatttcaaacaagctcaggcggaacaatttctttaacaaattgtactacaagtataaagaatctacatggtataaccgctacagcaattaatattgaagagaatggaagtatacaaattcaaggcgggactactaatatagaaaatgtttcgaaagcaattgggtttacgcttaacaatgataataatagaattaaactaagcggtgatattacattaaataacgttaaatacaaagcattttctgttaagcctgaagctgcagaaggttcaggaagtattaattttatttctgatatgtatatttatgataaaaatattattccgtcaggaatatacagtatagaaaattcagtttggaatttcaacgctgcatatgaagacagtaattattattatgtaaacagtgggtcaggaaatatatttacaggtggtttaggcgcagatgatatcggttcagaactaaattcgttgacaatttcagagctggcagaatatggtataaaatggattccagaagaaaaactgctaatattaaataatgtaacaattgaaactgataaaattgctgtaacttcaaatctttcaaaaaaagctattatagactcatatgataatatgcaaatatttatgtatggagataattccattaagtatacaggaacagaagctgatgcttgtggtatatttacaggaacatctaatattgtaggaattgaagattcaacaaatcagccaccaacgcttagtatcgatatgaatggcaacggtatatctgcgattaaaactaaaaattcagatacgcaatatattaattttaaaaatattaatttgactgtaaagaactctgaaaatggtatatatcttgatggctactcttggtatacagcacttggatttaattttgataattcatctgttgcttttgagaatgtgaatagtgctattaatttaaataatcttggttttgtagacttcaagtccacaaattcaaaatttgattttggaaattcttcaaatataattgccggtgataaatcgttaatgacaggaaaaattttatctgataaaaaatccagatatactgtcggaaatgctgatggagcgctgtggtttgatacaaaacttgatgccggtacatattattatgacggaacagcattttcttcaatttctaaaaaaataacaattgatactggaattgtagggggaacagttagtgttgaaaatccggacgcaaatattggcgacacagtggttttaactgttgaaccgaatgaaggatatacctttgcaaacggaagtttaacatatactgaattgactgatggagcaaatcctgtggtaataactgaaaataatggaacttatagttttgtaatgcccgaaaacggggttttaattactgcagcatttgccaaaaacgttactattgatgacagcaaaataacaggggcggacacaggaaatcctgtaataaatgcgtcaacaactgatgagccaagcagtgaaattaaaaacagtgatgttagtattccaaaagacgtggtagatagtataagcagtgcagttcctgacagtgtggtaatcaatactgatgtggcggagatagaacttgataaaactgcatttgagaaaatttcaaatactgcaggaagcgaaggtattagtttaaaagttgatgttcatgaggccagcagtaatgaaacagtaaataatatgataatgtccggagcaaaagttatagacgtaaaactgatgtcaggaactacagaattgttaccggaaagctcagcaggctcaaacggaaacttgacactaaaagtgccgtatgaaaccgaaacggcagtaacaaatccttcaaaagtatcagtagtgtatataaatgacgccggagaaaaatcaggagtagcgtcggcatatgacacagcaagtaaaaaggtaataacaaagttaaagcatttgagcacatatgcaataactgacagtttgggatatgagttggttacagaattagtaacgccgtcaaacgagaactttaaccccggtgacgagatagcggtatcggtaaaagttaagtccagcgaaccgactaatttcggaagctttaatatagctcttgactatgacagcacaaaaatgacattgacatcagtagaagcgtcagacgctataaaaacaaacggatataatttggtgcagggagaaggagcggagcaaaataagattgcgtatacgtcaggaagcagctcggttgatgtatcaagcgaagctgtaactataatgacagtaaagtatacagtaaatagaggaatagaaacagcggctaatgtatcagtaggaacgaaggacggatattttgcaccaacaggagctgatactgatatagcagcagtatcaacagctgaaaccgttaacctgtataacctaaaagtaacactctcaagcggagatggaaacacagtgacaggttcgccggcagcgtattatacaaagtataatacggcaggactatacacagacgacagttatgctacggcagtgacagatacgcaaataaagggactggtaactgcaaacgagaactaccgtttggcaaaagatacaacagaggaaccactgtggaaaacaagcggaggaacagggtatacaagcacagatttgacaacaggaacatatacggaagatacaagtctgacagctcaggcagtgcgccaatacaagataacgtttgagccgggaacacacggaagttttgcagcaggagcagtgacagagatagcaaaggatgtaaactcaaaattgctgcagtcagacctgccgacaatagaagcagaagcaggatataatccggatggctggatgagcggagatgtaaagatagacctgagtacatatgaagtgacaggagacgcaacattgacagcggcatatacagaagcccagtatagcgtaacatttaatgcggtgacaaatggagcgtatacaggagagacaggagtaacagacggaaaagcgacatatggaacagatataacgttcagtgtagagccggcaaacagcggagatatagtaggatatgtatattacacagtaaacggaggaaacaaaggatacttaacaggaagcaacggagtatatacaatcccatatcagatgtttggagagaatatccagatatatgcaggagtaataacaggaacggtaaaggttgtagcgcacgacagttacaatgcggcgccgagcggaaaagatttggtagtagtaacgacagcaaagaatgaaaatgccaaatatgtattgcagtcagccggaacagcagcaatagaaatgtattactcagaaggcctgggaggatacgcggcatttgtgccaaacaacggaacaacaattacggagcaggaagttaaggacagactgtcagtaatggagggagagacagcaaatacagtgatagcgcatacggcggacataaacggagacggatatgtaagatcagtagacgcaatgatagtaaacgacctgtattacaacaaccgaataggagacacatcagacgaaatgagaataaaagcaaactactataacagtgacgacgcggtagacacaagtgatatagctgcagttctttatactgttgtaggacgttcttttactaaataagactggaggattagattgaaaaaatatatttcgctatttataatatgttgtatgtttttatctttaatgccgggaacagcagtatttgcggccgctgattttgattttattttaacatcagacggtcaaagcacggtaactattggtgttggggatgaaataactgttgaatttgaattggtaaaaaatgatggggcttcatattcaatgtattcaatgcagaatgaaatattgtatgatactgaatattttgattatgtgcaaggcagtataaatgttgaaaacggatttaagtatggatttagaaaacttgagtcttcaagcggagcaaaagttttaattggttttgttgattcgagtgaaaacggaaccgaacgccgcggcagaacattagtcggtagttttaaactaaaggcaaaaaagacaggaaacagcagtataaaaaatgattctgcttatgtgacaaaaagcgatttaagcagatattcatcatcatattcagatattgacgcggaaatagtagaaggttcaatatccactccaacacctgttccgtcgttgcagccgacttcgggacctactgctaagccaaagccaacctcaaagcctgatacaaacggaaacggtggaaatggaggcggcggaggcggcaatgatacaaataccgccacaccaaagccaactgctgctccttcagcttcagaaggaccgacatctgaaccaataataacacctgttccaacaagtggaacttctgttcagatttttgatgatgttgaaactggttattgggcatatgatgatattatggagctttattatgcaggtatagttaacggagacagtcctaatacatttttgccggaaaataatattactagagcagagtttacgaaattagttgcattgctttttgagtttgaggtggatgaaaccgcagagacaaactttgtggatgttccggcaggcgaatggtatactccatatattgcggctgcatacaatgaaggtattgtgacaggatattctgaaactaattttgagcctgataaaaatgtatcaagacaagaaatgtgtgcaataattggcagaaaacttaatattgtatcagataaagaaactgtatttactgattctgatgaaatagaggattatgctaaaccttatgtgcaatcaatgacggaagcgggatttataaagggatatgacgacaacacgttcagaccgtttgaaaatgctacaagagcagaatcggcagctgtcattaaccgagtaaaaaaatctaaatagacgaatgaacatgaaatgtgtttcgtgtttagctgggcaacagagctattttgaagctctgttgcctttttagttataagccaaagattaaaatctgttattttaataaattataaaaatataatgtgtataatgtgtataattgacaaaatataactaataaacaacaaaataaatgtagcaatcaaaagaaatgtgtgctaaactaagtttagttgttagtatttactgtaatgttgtgaaatatataaaaatataaaataaatttattattaggaggtacattatgttatcaaaagcagacagggcaggtaaatttttaacgcgtatttttctttgtgcggcaattattcttggaactatggttcagttcgtttcggcggcaacccaggatttgagctatccggctcaattggtgaaaatttcagtctatggcggtgaacgaaatttaaatatttccgggtatggtgaaggttctgctcttaatacatggaattcaaacggttcaacaaacgagcagtggagaattgattatgtaagcagcggagtttttaaaattgttaacgtaactacagacaagctggtatcagctgaaaataattctgctgtaagcaacgcaaaatgtgtacttcttaatgataacggaagttcttctcaaatgtggaatattgttggtgttcagcaagattttttgggaaacgatttatattacaaaatttctaactatgcaaatccagaccttgttataagttataatacaactacaaatgctattaccttaaaaacttatacaggcgccaacaatcaaaaatggaagttaaactgtgatggtttagacggttttgccggaaattgtcttgttcaggaaggtgaaaaagctggtaccattggaggtttattaggcgaaacagtatatgtgtcaaatttatctcaacttaaaagtgcattgctcagcacgaaaccgcttacaattgttataactgcaaatattgacaactgcaacagtgaaatgtatgatttaaggatagaagataataagacgattattggttcttatggtgcaaataggcttactgacccccgtctgcgcacggacgactattttaaagaggaggcggtaagcaataacattgttatcaaaaatattaatttcaatattgctgaaagagaagatgtagttgcttttgcagtatatggttcaagaaatatttggattgaccattgttcatttaattgctcattagatttatattatgatgaagtaggtaagttcatttgggtaaatagatgcgaatatgcaagtttagatcctgattttgtaaccatatcttataatgaatttaatcatagattttggggtatagcttttggagctaaatatactgcagaagatagggcgagcgctatgtataacaaatttacttctgttgttcaccgcgcaccgcagcttggaaacggaactcttcatgtattaaacaactcatattatagaaatgattctaccctttataatgacggatacgcttccataaaatgcggagctggttcggcagtatattctgattcgaacagatttgtcggatataggaaagaatcaagcggctattgggatatggaagttacagtagattcttcagccagtttcatagaccatggttcatatacaaacaagggtgaaacacctgtgtctgtaccttataagttagcagcaccgactgatggaagcgttacaacatggagcccggctgaaaattatggttatagtattgtaaaagcctatggaaataatgatattacagtattctgtgataattattccggagcagtaaagaacttttctgaactgcattatataaatcatgaggcttgttcaaattacattgattcaactgtaatttcgcctgttaattttgcctttagtgacccggataatgacggtgatgatactgtagataccggaatcgttgacggcggaaaatatatgataaaaaatgttaacagtggtctgtatcttgatgtagctggcggtgctgcgtcaaatgggacaaatgtacagcagtggggggctagctcatccgcttcttacaatacgtggaaagctgtttcggtaggaaatggatattatcagctttattctcaggttggtgatggaaacacatatttattagatgttgcagacgggaatacatcaagcggaaccaatataaggatttggcaaaatactttttgtgacgcacaggtatataaactggagaagcagagtgacggaagctatgctattttaactaaaatcactaataaccaatcaggtttggatgtggaatcagggtcaaaatctagtggtgcaaatgtacagcaatgggggtacgctggaggtgcacatcaaaaatggatttttgaaaaggtgaactaaaatcactaaataaatattggtaaaataactaaacattggaacttttttctaaaacattcgtcttattaagtataagtgattaatttttgcttatataaaatgtactgaaaggcggagttattatgaagtgtaagaaattagtttcaatgtttttagttgtctttatgttagtttcaattgctttaattcaaacaattaatgtatcggcggatagttccggggctatttatgtttcctcttatcctgatttagtgaacatgatgaagaatcctggcggaagttatattcttttaaaggatataaagataaataacgctgataattttaatgttcaaaattttagcggcatttttgacggcaatggtcatagtataagtttctcaaattcaagggaaggcggttttgttgaagttcttgaaaaaggagcaacgataaaaaatctccatgtttatatttcagcggcaaccggtactgataacgtaggtattattgccggaacttcatatggaacgatggcaaactgctgggtttcagggtatgtcagcgcatctggcattaattgcggcggtcttgttggtaagctttcgggcggttcggtgagcgattgttattcgttggcaacggtaagcggaaccagtatttatggaggactaatcggagcagctgaaaatgcaagtgttgaaagatgttatgtttcagcttcaatagaggggtcaagagctgaggcggggtcttttttgggaagcaacagttcatcttcaataaataactgttattataattctagtaaaaacggagcgtttttaggggtaggaattggttcggacactgtcactgcaaagactagtgaagaaatgaaatcagcggagacttttgccggatttgacttttctaatacgtgggtacatattgatggtgaatttcctaaacttgtctgctataacggaaagggaacttcagataatccatataaaattcacactaatgacgagttaatatcaataattcagccatatttgggagatgcaggaacaggcagatattatcagctcgctgcaaatataaagaattattcaggtccatcactgggagatgataatagcagatttaccggtttttttgatggaaatggttatgtattttataacaccaatatatcaagcggaggaattttttattcagttgctgaaaatgccgttgtaaaaaacgttgtttttgatggatacaatttttccggcggaggtgtagctggcgctgtcgcctcaataaatcacggaacaatagataattgtcatgttggaaacggtacaatttcaggttcaaaagatttaggtggaatcgttggggagaatattaatggcactgtcactaattgttcttttacaggcgatattaatggtcgtggttccggcataggcggtattgtgggatataacagttacggcacaatatcgaattgtgcggtctattcgggaactattagaagctccgatcatagtgttggaggtgttgttggggataactccaatggattagcagaaaattgtttttcacttgcaagtgtgaacacaagtaccagcgaaagcggaggagtcgcaggaagactgtataatggagttatacgtaatagttattctaatgccggagtttatggaaacgactcaaatagtatcggaggtattgttggcagtataatcgaagacggagttgttgaaaactgtctttacaataaagaacttgtttctgttttaataggcggaacagaggataaaactggaggtatatcagcagatgaactcaaaaatgcttattactattcgggatttgattttacttcggtttggactgtagatgaaagcggagagtgtattgtattgtcttcgatttcaggaaagggcacaaaagaaaatccgtatttgattagaacatcttcagattggatcagagttggaattgggataaaaaacagcggagaaagaaattattataaaataatgaatgatttattctctgtaagggccttaggtcaattttgcggaagtttggatggcggaggtcatgaggtaggacaacataacggaaatttgattaccacattaaatccgggtggatatattggcaatttaacggtatcaggaataattgttgagaccgttgacaaagcaacaatagagcattgtacagtatataattcaaatgttagctattttgatggaggatttgtaaataaaaatttgggaggtaaaatttctgattgttcagtaattgactcaaccatttctttgactgatataacaggcggatttgtagggcaaaattccgaaggcggagtaataaataattgttatataatgaattgtaaagtttccggtaatagtattgccggtggatttgttggaaacaacactaacggcacaattgaaaattgttatgtttatgacactgttgtaagcgcgccaagtactgttggcggtatggcaggaagaaatgataataacggaaagattaataattgttatacgggggcttctgtttcggaagcgaattatgcaggagcttttgtaggtatgaattacgcagcaataagttcttcgtatgcaaacggtggatattcagcaggcaatgctgtaccggcagtgaaatttgcaggattgaatgaaggaaacatcaccggagaaaatcttgatttcagcggaaatactttaccatataaatatattcaaacttcaggtttaaatatatctgttaacgatacaacggtttatacacctcaaactcctgatgttacaccaggcagattaactgatattagcggtcattgggctgagcaaaccataagaaatctggtttctaaaaatgttgtaaacggatacgaagacggaactttcagacctgaggatagcgttactaagggagagtttattaaacttttgatgagtgcaacaggaaaaggaacttctgacggatttacaaattataaagatgttaatgcgagttgggcaagaccatatgtaagtaaggctatatatcttggaatttgtgataatataagcgacagcactgagatatttggagttgacaagtctataacaagagctcaggcagttgctcttatgggcaggttattagcgccggataaaacaggaattccatcgtttacagataacagtagtattccggactgggcgtcaaacgaggtttattctatggttgaacttggcttaataacaggtatggaggacggaagctttaaacctttagataatcttacccgtgcagaagcggcaacaataattgaacgtattatgaatttagggtaggtaataaatatgaaaaataaattaacaacatttatcctgactgtttgtttggtttttagcatagttcaaataggagctgtgtcggcagatgataatttgactgttacttcaccaaacggctgtatatccatttcaatagaaacaaaagacggaaaaataaattatagtgttaagtataactcaatcagtataatcgaaagttctaatattggaattacattttcttcagttgattttagtgaaggggtaaaatatgtatcatcatataagaatactgtagatgaaacatattcgatgctgacaggaaaagcatctgtatatacaaataaggcaaatgaaacagttatgacatttgaaaaagacgggcatttgcttgatttatatgtaagagcttatgatgatggaatagcgttcagatatgggttcaatgaaaacggtcaggcactttcagaaaacacaactttcagattacctcaaaattgcacagtaaatgctatggaatacgaaatgtgttatgaaaatttttataatagacataacttatatgagctgaatggagtatatggtatgcctatgactgtcaaggttgctgataatacttatgctttaattaccgaagcggaacttaatggaaactatgcaggttcagtattaaatgctgacggcagcaatgttttaaaactcggatatgagcctaaacaatcagagccggttgaaatttcagcaccatttttgtcgccgtggcgcactgttataattggagatttgaataccatagtttctacagaaatgccggaaaatctctgtgctccttccaaattagaagatacctcgtggataaagccaggagtatcaagctggacatggtttaacggtgacccaacaaatgaccctgaagtttataaacagtatattgacttatctgccgatatgggctggcaatatgtattgttggacgagggctggcagccattagaatacgatgagtatgggagaaagacatatagtggaattatggattggacagaggaagttattgagtacggaaaacaaaggggaattggtattattgtttggtctacaagctgggatcttgatactgaacaaaagcgcgagagattaaaagaatgggccaatatgggtattaaaggtataaaagttgacttttttaatagcgaaactcagcagacgttaaaacttatggactcaataactcaggagtcagcagagttaaagctgctggtaaactttcatggatgcgttaagccgacaggagaacgcagaacttggccaaatcttattacacgtgaggcagtatatggaaatgaacattttttaagcggagaaaattggggcccgacggctgagcataattgcacattgccatttacaagaaatgcagtaggaccaatggattttacacctgaacttactaatcataatgataaaaattattttaccgatggtcaaaaatgtgcgttgcctatagtttttgaatccgggatacagtgtttgtcagataagcctcaaatatatgaaaatagtgcggctcgtgaattatttaaaagcattcctgctgtttgggatgaaacgaagctcttatcaggagatattggagaaagtgccgcagttatgagaaggtttggtgatacatattatgttgggagcatttgtaataatcaatatgttgtggatataaatcttgattttcttaaaagcggcaagtattggtttgaaatgtatactgacggttccaatgatacagatatagctgtttataatggtgttgttactaatcgggatacaataactattccgcagttaacgcacggcggaggagctgtaaagtttacaccgataaaagaaaatacaaagttattttcggacattgacggacactggtgtgaaaaaaatatattatcattagctgaaaaaaataaattgaataaatatttttacggcgagtttggagtggatgaatatataaccagagctgaatttgttatgcttttgacagacgctttggatataggttgtatgcaaggaagtcctagattttatgatagtataaggcatattgccaagaattatatttatacagccacagaaaaaggtattattaatggaacaagtgaggaaacgtttttatcggaatcgaatatcactcgtgaagatgcggcaactataataggccgatatgagaatcttaaaggcggtataaacagtggattttctgacagcaatgagatatcccaatatgctaaagagtatgttgcacaatgtgttgcaatgggagttataaccggatacgaagataactcgtttaagcctaaaaataatattactaaagctgaagccgctgcaatgctatttaggtgtcaaaacttaaagtgatacttttaaatcccatgatttcatatcatgggattttatatttttatttctttagaatatgctgactttttagttgcaaatactattattgttatatcaatataaaaaaacgttatagctattgccaatatatgttaaatatgttataataaaaataataaactattagctttatttataaatattgataaaaatttatataaaaagattttatctttttttgggagatggggaaaataaataaaataaaaaaatatattagatatgtttttcctttcattttagctggtatgttttgttttataagtgttacgtctattgttacaattattcatatgcagggtaacgcacgggtgattaattataccggaattgtaagaggtgccactcaaaggcttgtaaaacaagaaatgaatcagtacccaaatgatgaattaataaattatattgacggaatacttcttgaactttcaacaggtgatggtgagaatggtttgagaatgattaatgataaagaatatcagggattagttaacgaaatgaaggaaaagtgggaagttataaaatctgaggtacagtttgtcagggctggaggagataagcataaattatttgatttaagtgaagattattttgcgcttgccaacaagacagtttcttctgttgaactttatactgaggagcgcgtaaaaagtgcaaagtggactttgtttgttttaaatgccggttttgttatattatttattttattctttatgcttggtatgagacaaaaaaaggttcaaacagaccttatatctgctaaaaacgccagccgtgctaagagtgaatttctttcaagaatgtctcatgaaataagaacgccaatgaatgggattatcggaatgacagcggttgcgcgtatgtctttggataatagagaaatgttgatagattcattaaataaaattgatttgtcctcaagttatttgttatcactaatcaatgatatactagatatgtctcggattgaaagcgggaaaattaaacttgataatgaagtttttgagatcactgaagttttaaaacgaatatatataatgtttaagcaaaagagtgatgagagcggtatagattttaaaattaaaagcgataatgtaaccgtaaataaagttattggtgatgaattaagaattagtcaagttattattaatataatctctaattcaataaaatttactcagttcggcggtaaggtaactcttgatgtcagacagaaaatcgatgatgatgaaaaagttatatttgaatttgttgtttctgatacagggataggtatgagtaaagaatttcagagacatatgtttgaaccgtttgagcaggaacggaatggaaactctcatcaatatgcaggtactgggttaggattggcaataagttataactttgtaaaattgatgggcggtgaaatcattgtacatagtgaattaaataaaggttctgaatttgttatttatttacctcttcaaaaagcagaaaatgcgaagcttaatgaaaaacaagataaaaatatttttgaacaaaagaaagaggagcttatgaatctttgtgaggttcatatccttttagctgaagataatgaaataaacgcagaaattattacttttttattgcaaaaatgcggtgctgaagtagatttagctatcaatggagaagaggcagtgaaaaaatttgctgaatcagctgttggaagttatgatttgattttgatggatattcaaatgcctataatgaacggtttggaagcaagcaaattaataagagcaatggagcggccggatgcgaaagatattttaatagtgggagtctcggcaaatgcgtttagtgaagatgttcaaaaagctaaacagaatggaatgaatgaatatatatccaaacctatagatatgtcgaaattgtttgaggctattaaaaagtatttataattatatataactagaataaggtttaactaaaaaatatttgaaatatatactttcttttaatgtggcattttgttcttttatagaaaaaataatttatattttaataatgacagttaaagatattaccggttttaaaagttgataaatttggtgagagtgaacaataaaaagctctgtagacaataaattctcattatttatatagtaaaatcataatttggttatatccaacttatgatttgtaataaatcctgcaatccggacaattaagttagcgtgctgccttgattatttcacaaagaacctaaaatttgttaagcatgtttttataactgcagaaatacaaaagaggttatgttgatgagatagattaaaaagtgcataatataaatagaataaaaagtagcgggatagcatgtgctatcctgctactttctggtaaacttaaagtataagtaataccgattcaaaaatcaatacatttttgaatatcaaaccatttggtgactcctaggggatttgaacccctgtagccggcgtgagaggccggagtcttaaccacttgaccaaggagccatatggtagcggtaactggatttgaaccagtgacactacgggtatgaaccgtatgctctagccaactgagctataccgccaaatactgttattccctcaatttgcgaacaacagttgatattatatcagagaaaataatatatgtcaacactttttttaaaaatttataaaaaattttttaatgcggctttttaatcttttacaggctatttattattttttaaattttctttttttatgaatatcaattcttaaaaaagaaataatattaatatgctgatacgatatattatatatggcttgctcggaatgaatatggaaatcttctggaccagcctttcgggaataaaaagcggttctcataatttaatcggccatacttctatatggatgttttttatatatggtcttgctgtggtcattatggaaccaattcataatttaattgctgaccaaaattggtttctaagaggttgtgtttgggcttcggtaatttttgtcatagaatttactaccggaggtattttgagattgtttcaaattgagccttggcattataccggtgaattttctatcatggggcttattcgaatagattatgcgcctgcctggtttgccgtcggcttactgttcgaacgtattcatactttgcttttaaattataatattgggctgaaataggtgattgaattaactgtttatcattttgttcatatcttttcttagcctttttataattcttttttcaagtcttgaaatatatgactgcgaaataccaagaaggtctgctacttctttttgtgtcatttcatctccgttattgtttattccaaatcttaattcaacaatatttctttctcggcctgaaagtttttccattgcaagataaagcagttctctatctgtttcgtcttctatgtttttttgggttacgtcattatcagttcccaatatatcagaaagtaaaagttcgtttccgtcccaatctacgtttagcggttcgtcaattgatacttctattctgttattattgttttttcttaaatacattaatatttcattttctatacatcttgaagcatatgtagcgagttttatatttttttctggcttaaatgtatttattgccttaattagtccgatggttccgattgagattaagtcttcaatacctataccggtactgtcaaatcgttttgctatatatactaccaatctcaaattgtgctcaattaatatttgtcttgccttgtcggaatagtcaggatttccaagtctcgatgtccaccattgttcatcttctttattcagcggaggaggcagagtgtcgcttcctcctacgtagaaaactttgccatccttttttgcaacaaagtttagataaagctgttttaagtacttttttagtttttggtacattattcttccccctgaagatatatttattatttttttctgtaaaggcgtccgggcttgcaattgcattatacagaccatcactgcaaaattccgtatttacgaacccaacatagcaattttttttgtcaaaataatattttccatattttgttgttatttgttcgggttcaaataccggtattaagttatcattatttttggatacagtagatattttaaccaacctatattttatatgttcgttttctaaaaatgtatatgagtttttttcgccgccgattaaaataacaggttttccgcttagcggttcaattagctcacatcctgtgtccattaaaatatttagtttgtattttttattcatcaatatcaattcagcgctttgtattattttatttcggcttaggtttctgctgcatatttttataaaagcgagaataaccaaataggcagctataactaatgatataagagttgtaatgtttaagtccaagtatggtaccccgtttgagattatagatgtatcttttatagaaatttgatatgctataaaataaacaaatcccgaaaacaataatgatactataaagaataccaaagtatgtttaatcagtttaataaaagtgttgcatttataaaatatcattacgaataaaacagtaaataatattcggcctaataaagtatataataaatatgtatgcggaaaaaacataattacagaatatagagctgatattgctgaacctagtgccagtctcaatatcgtggttctaaatctaataattatgcttgctgcaaaaattattaaagagttaatcaaaaaattgcttaaatataaaatatctatgtatatggtcaattatatcaccaaagatattatagagcagtttttgaaaaaaatatgtcagaatgggggaaaaataaaaataaattaattgatgtgaagtaacttcgcattttaatgttaaaacaataaaataacaaatatttatagtatatagataaaaattttttaattttgtgtcttgaattccatattgttatatgatacaataaaaaagttaaatatatatatttagaaaataatattaaatttttttaatgtaatctttaataagggaaggttgataaatgtggaaatcactataaacaaaacgcaaaatcctaaggtaaagcctgatatgagtaatttgccgtttggaaagtatttttcagatcatatgttcattatggactatgacgaaggaaagggctggcatgatccgagaattgtcccatatggaccaattgaacttgacccgtctgctatggttttccactatgcacaagaggtatttgaaggtttaaaagcatataaatcttctgatggacatgttcgtttgtttagaccggacaaaaattttgccagattaaatgtttctaatgaaagactggcaattccgcaaattgatgaagctttatgtcttgaaggtttaaaaaagcttgtagaattagacaaagaatggattcctgagcaggaaggcacgtctttatatattagaccgtttattattgctaccgatccatttttaggtgttaaaccatccgagtcatataagtttatgattatatgctcgccgagcggtttgtattatcctgaaggtttagctcctgtaaaaatatatgttgaggattcttatgttcgtgcggttcgcggcggaacaggatttactaagaccggcggtaactatgcaggcagtattagagctcaggttgttgctcatgagaagggatattctcaggttctttggcttgacggtgttgaacagaaatatattgaagaagttggttctatgaacatattctttaaaatcaatggtgaagttgttactcctgctctaaacggaagtattttgagcggtataaccagaatgtctactattgaacttttgaagtcttggggagttccggtatctgaaagaaaaatatcaatccaggaagtatccgacgcttatgataacggtactcttgaagagtgtttcggaaccggtaccgcagctattatttctccggttggtgagcttagctgggatgataaagttatgttgataaatgataataaaatcggagagattactcaaagaatttttgatacaataacaaatattcagaccggaaaagaagaagataaaatgggctgggttttaaaagttgattaagtaattgattgggtattataatatatataatataattaggaatgcaggcatcagtgtcatttaaattcaaaatattttgatagaatgaccaatgcctgtttttttataatttaaggggatgagctgatggagcgcggaagtggaatattaatgcatatttcatctttccctgcaaaatacggaataggtacaatgggaaaggaatcttttcaatttgttgattttttgaaaaaaagcggtcaaaaatattggcagatcctacctattggtcctaccagttttggagactcaccgtatcaatcattttcaacttttgcgggtaatccttattttatagattttgatttgctgtgcgaagatggttctttaaatttagaggattattctgaaattgattggggaaacgagcctgacagagttgattatgaaaaaatatttaaaaacagatttaaggttcttaagattgcatactctagagacagaataagaaaaaaggcggaaatagataattttagatttaatcattcatattggattgaaaattattctttatttatggccttaaagtttgataataatctaaaaatgtatcgaaattggaatgaggatattgtaaaaagaactcctgaagcaattattaatgcgtataatgatttaaatactgaaattgatttttgggtatatgtacagtatttattttataaacaatggtatgcgttaaaagaatatgctaatatgcagggaataaaaattattggagatataccaatttatgtagctgaagacagcgcagacgcctggtctcataacgaggtgcttatgcttgatagctgtggtattccaataaaagtggcaggctgcccgccggatggttacgcacccaaaggtcagctttggggaaatccgctctataattgggactacctagcttcaaccggttatgaatggtggatagaacgtttaaaagcagctctaaaaatgtatgatgttgttcgtattgaccattttagagcttttgacgctttttatgcaatagattatggaaaacctgacgccactgagggagagtggcttaaaggtccaggagttgatttctttaataggctgaaagaaactttgggtgaatccctcgcattaatagcggaagatttaggaactataacggatgatgttagagccttactgaaatacagtggatttcccggaatgaaagttatgcagtttggcttttctccgggagaaaacagtgattatttacctcataattataaaaataattctgttgtatatatcggcactcatgataatgatactctaaaagggtggtttgattcacaatctgaagaagttcaaaattttgcggttaaatatcttcgtctgaataaagatgagggatacaattggggatttataaaaaatttattatcaactgttgcgaatacggcaatagtaacgatgcaggatattctgaacttaggaaatgatgcaagaatgaatacgccttcaacactgggaggaaattgggagtggagattaaagtctatggatttgctttcagactctctttcttcaaaacttttagaaattactaatatttattcaaggtaagttatattttgtttggttcgcctggaaaatttgggcgaacctttttatttagaataattttataaattatattattataattttgttaatctacttgaagtttaagcttttatttgctataataaattttaaaattaagaaaaatgtctgattaggacgtgtttaaatgggcaaaaaaaatattgaatcaaacaaaggaaaaagtaaacgaatatggatttattctattattggcgtgctgttggttttgactggagtttttttattaagtgaatctcaatttgacgttaatcaaattcctaatttgtttttagagatgaaaaatatgctgtttgataaaacagagaataaagttcaaattgccgaggaaatgcctgcggctaaaattaaggtgtattcagaacaagcatcggttgttgagcctgacaaaataaccccgtctaatctaaagagtgctgatggaacttataatgctgaaggcggagctaataatctttatgacggagatatttatacatgctcaggaagttccaattcttgggcaactctagatgctggagagttaaaaactctttcatatataagatatataccaaacacttcatcgcaaatcatgggcaatacatgcgtcggaactaaatttttggcttctaaggataataaatattttgttgagctgggaacagttaatcctgacgttaacggtgatataaatttagattggcatacacttgagttcagcggttatggagaatacagatattttaaagttgagctttctccgtatgcgtcttttggagaaattgaatgggtaagtgatactggtataatcgcagatgaaaatgataaaactgattttagttttatggcctttgacgctatggaaggatttgaaggatatactgtcttatctatatataataaagataaaatattaaaatgcgtggaaactatcgactctgattttaaggtgggtgattatacaaaactggaattttctgatattaaattagagcttggggattacatacgagtaataacatatgataagcaggatatgaaaatggcggttgacttacctttggattatcgctttacggaggcgtcttcaaatttatcggtttcaaatatatatagcgataatatgatgtttcaggcagatcaggaactcgtggtatcaggaaaaggagtgtgcggttctgaggttaaagcggttattaaaaacatggatacgggagaagaattttcgggaagcggtattgccaaagatatttccgactgggagataaatttaggagtttttgaaaacggcggaaattatgaactttttatatcgtctgaagatgaaaagttagaatttaagaatataacctttggtgatatatgggtttttgccggacaatctaatatggaattttatctgtgcggggaaaaaagcggaaatgaactattaaatactaaggaaggtaagaagaaatcaactactgataaaatcagaatgataaatatgtataatatcggatacatgggagcagcaggtgaagttgagaatgttccgttaaacgactggaacgaatattggacagaattcacgcctgacagagtttcttatatgtctgcaatagcatattatttttcccagggaataaaagaccgatatgaccgtaatgtaggaataatcagtgtagcggtcggagataccgaaattaatcaatggtatccaagaggagagagttttggaaaatttacaggtgacagcggaaagctgtacaataaccgtatatatccatttactaagcagaaaataaaaggtattttatggtatcaaggtgaagcggataattacagaactaatatgaatgctgaggaatacagcgacgcgatggccggattaattgatctgtacagacaaaaatggagcagtgaagatttgccgttttattatgttcaattaacaagatatgaaacgaaggatgcaagtgaaattcgagaagggcagcgcatagccctccaaaaagtgagaaataaaaagaatgtaggaatgtttggtctgcttgatataatcggacggtatgaccaaggagaaggatgtgcaagaaccgatattcatccatggcagaaagaagtagtggcagatagatttcttgattatgtaggacatgatatatacaaggattcagaagccaatacttcgggacctgtatatcagtctaagcagaaaattgataataccatagttctgacttttaaacataaagggaagttaaaagttatggataaaagtcaatatgctgattctgtctgcgagcaaaaaatatcagcttcatctacagataccagcattttgcatgagttctggatttctgatgagaatggcaaattttatccggcaaatgcaagacttgaaaatgataaagttgtcgtatggagcgacagcgtttctaatcctacagatgttatgtatgcttggggagcgtatcccgaaatgccaaatttaactgatgattcaggacttcccgcagtaacttttaatacatataacggaagtgaagttttatagtgtttatttgataaatattttgatttattgttttgaccccgcctaatatattaagcggggttaagtatagcatggaataaaaatattaccggtaaaatttataatatgaccaaaaaattgtcaaaaaatatggtttgtttataaaatagtaatctaaattattgacattaaagtcattcaaaggtataataaatagaatgctaatttgagtttttttggtctaaaacattttcagtttttatactgtttttttgcactctgattctaagtataaaatctaaaatttgtgtcttttggcagtttattttgaagatgatattttgttacataggaggtatttaaaatgttgaaaacatttcgtggcggtattcatccaaacgatatgaaagagccaacagccggaaaggctatcgttgaacttgatccgtcgcaggaaatggtttatcctgttgcccagcatataggagcgcctgcaagtccgattgtcgaggttggtgatatcgtttatgcagggcagaagattgcagaagccggaggatttgtgtctgcctgtattcattcatctgtatcaggtacggttaaagcgattgaaaagaggcttcatccaaatggattaatggttaattccatagttattgaggatgacggacaggatactatttatcctaacttaaagggctgtgatgattatacacagctttcgcctaaggaaataattgaaattataaaagaagcggggatcgttggtcttggcggagctaccttcccaacgcatgttaaactgtcgccgcctccggaagctaaaatagattatgtaatagttaatgccgctgagtgcgaaccatatttaacatcggattatagaacgatgcttgaaatacctgaacagattattggcggattaaaaatagtaatgcatatttttggattaaaagatggttacataggtattgaagataacaaagagttagcaattgagacgatgaatgctcttgcggcaaaatctaaagatgttgatattcatgtggaaaaattaaaaaccaaatatccgcagggcggtgaaaaacagcttattaatgccataaccggccgaaaagtaggaccgggacagcttccatatcaggttggcgccattgtatgcaatgttgatacttgcagagctatttatcaggctgttaaaagaggtctgccggttatgacaagggtggtaacaaccggcggtgactgtgttaaaaatccaggaaattacaaagttcgtatcggtacctctcttaaagatgttattgaacaaacgggtggatttgtacaagagccgaccaagctgataatgggaggtcctatgatgggtatggctatccctacacttgatgtgccggcggttaaaggcacgtccggtcttttagcttttggcccggatttggcgtatggttttgaagaaaacgcttgtctcagatgtggtaaatgtgtgtatgcctgtcctatgaagttgttgccgaacaggcttgatgaggcggcgagagcagatgattttaaagcactggagaagttgaatattgcagattgtattgagtgtggaagctgcgcgtttagctgtccttcaaaacgtagacaggttcagcagataaaggtggcaaaagttaagcttcgtgccgcacagcaaagaaataaataaaggtggagggaataaatttggataatttacttgttgtttcacattccccgcatatatcaggtaatgatacggtcagaaaaacaatgcttgatgttataattgctttgattccggcattgcttgcaggggttttggtttttggctatagggctgcggtcgtcactgttatcagtgttttggcatgcgtcttatttgagtggttatggaataagatattaaataaaccaactactgttggtgacttcagcgctattgtaacaggtatgcttttggcctttaatatgccggttacaattccgctttggatggttgttataggagcattttttgccattataattgttaagcaattttttggcggtcttggtcataattttatgaaccctgcactggctgcaagagcgtttttgctggcgtcgtgggcattagcgatgactacatgggttgctccgcatacagctgttccgctttggaatactgcggatgttgtgacatcagcgacaccgcttgcggcatatgcaggaaccgaaggagcttctcagcttccgagctattttaatttatttattggaaacgttggcggatgtattggagagacttcagctttggcaattttaatcggcggagcctatctccttattaaaaaagttataagattgagaatcccgcttgcatatcttttgacattagctcttggaacttggatatttgccggtccggatggattttttacaggagacgctttgtatcaagttattgccggcggcgtaatgctgggagctttctttatggcaacggactatactactactccatatactcctgtcggtcaaattatttttggtatcggctgcggggtaataactgttttaatcagagtgtggggcggatatccggaaggctgctcatactcgattcttcttatgaatattgttacgcctttaattgacagaatcacagcaccaaaacgttatggtgcctcaagaaaaagaaaggaggcacaagtataatgaaagagacagctactcttactataaagttgcttttgataactgcgattgtggcagctctgcttggcggtgtaaatatggtaacatcacctataatcgctaaaaatactgaggctgcttttaatgagaatatgaaagaactgcttcctgaagcagataagtttgaaaaggacggtacaaaactgcctgaacctgaatccggtgtaactgttgacggtatatatgccggtatgctgaatgacggtactatagttggatatgtcgcaagtgctgtatgcggagaaggctacggcggtgatatagttgtgatggtaggaattgattcagaatgtaaggtaacaaaagctaaagttacggaaatgagtgaaaccccgggacttggagcaaaaagtcagtccgattggatagaccaatatataggtttgggtcaggatatacaagttgataagaatggaagcgctgcatcagcagaatacaaggttgaagctatatcaggtgcaactattacttcaaaagctgttactaaagctgtaaacgcttctcttgacgccgcacgcgtggttattgatgataataatattccgccggctgaagaagtgcaaaataatgaaaattcggatcaaaatcaagttgaggaaggtcagccaagtgctgaatctgaaacaatagattctgaagcagaagttagtcaggaagattctgaaactaatagagaagaaccggctgacagtgatgaagatgttgaagggggtgcggcagaatgaagcaaaatacatattttaaaactttcctgaatggattgctttatgaaaatccttcgtttgtattatttctaggtatgtgtcctactcttgccgttacaaccggagttgttaacgctatcggaatgggtctttcaactacggcggttttgatttgttcgaatatcgttatatcgcttttgagaaagtttataccagacaagataagaatagcggcttatatagttataatagccggtttcgtaacagttgttcaaatgcttatgaacgcttatgttcctgctctgtcaagcagtcttggaatttacattcctttgattgttgttaactgtataattttaggaagagctgaagcgtttgccaataaaaattctgttggtaaatcaatgtttgatggattaggtatgggtcttggttttacagccgctcttattttaatctcagcagtaagagaaattctaggagccggaacatttgccggtatttcattgtttggcagcggatttcagccggtttccattatgatacttcctccgggagcattcttgacgctaggttgtctgcttgcggtaattaatataattgttatgaaaaggaaaaagaaaaaaactgctctgaattcgtcagatgaaaaggagggcatataatatggttgcagatttattggtaatcagtataggcgctatacttataaataattttgtattagttcagtttttaggaatatgtcctttcctaggagtgtcaaaaaaggttgatacatctgttggtatggggtttgccgttgtgtttgttatggcatgcgcgtcaataataacatggtgtgttcaatattatttgttggttccgttccatctggaatatttacagacgatagcgtttattttagttatagctgtgcttgtgcagtttgttgagatgtttttgaaaaagtctattccgtctttatatagctcacttggcgtttatttgccgcttattactacaaactgtgcggtgcttggtgtagctatacaaaatataactaagttcggcggaacagatatgagttttttgaagtcggtggtttatggtgtttcagctggtattggattcaccatagctattgtattgtttgcaggtgtacgagagagattagaaagttcaaacgttcccaaattcctgaaaggtatgccgattacgctcgtaacggcggcgcttctttcgattgccttcctcggattttcgggattaagtttctaaaggaggggaaataaatggtttcaagtattcttatccctgtccttgttgtcggtggaatgggattaatttttggagttttacttggtgttgcttcaaaagtatttgctgtaaaagaggatgagcgtgttcctaaaattttagaggttctgccgggagcaaattgcggaggatgtggctttgcaggatgttcggcttatgcaactgctttgtgtaaaggcggagttaagaccaatatgtgtcctgtgggcggtgacgctgtttccgaaaagatttctgaaataatgggtgttaagaatgaagtaaaagaaaaaatggttgcccgtgttctatgtaacggaagtcctgaaagagccgttcaaaaatattattttgacggtccaagagattgttacagtgcttcgcgtcttggcggcggggaaaaaatgtgtgcttacggatgtttgggatttggctcttgcgttaaggtttgtaagttcggcgcaatgagcattaaggatggagtagcatatgttgatatagacaaatgtgttgcgtgcggagcctgtgcggaagaatgtccaaaaaagattattaaaatactgccgcttaaaagtaagtatactataacatgtaagagtgttgaaaaaggaaaaattaccagacgggactgtgcggttggttgtattggctgcggaatttgtgcaaaagcttgtccgaagggggctataacaataagtgagcatttggcggttattgaccctaataaatgcgttaattgtggtatctgcgcacaaaaatgtccgcaaaaggctattaataaagttactccagctggattggttcgtcctgaaccaaaaccgtctaaacctaaattgacgccggaacaaatagaagctttgaaagctaaaaaagctgctgaaagaaaagacttaaatcagtctcccggcgaaagtgaaaagaatataaagtcaaaagttgttgatgcagatactaaattcaacgatgttgtaaagaataatattgatagagaagtaaaaataaaaagtggtgtgcaaatttctgatactcaggaaataaatgttaaagaatcgaatagaatataatcatggatttatattcaggaggtatatgtatgattgataataactgcgcatattgtgttgaaggcgagttagttgaaaagtttggaataaaaatatgtgaactcgaaacttgtaaggtatatttgtttaaagaacaaagttatagaggaagagttatagcagctcataaaaaacatgttggtgatatgacggaacttactccggaagaaagatgctcatattttgaggatatagcaaaaatctcttctgctctcagaaaaatttttaatcctcaaaaaataaattatggggcatatggggataccggaagccatttgcattttcatctggttccaaagtataaagatgaatacgagtggggtggagtgttcctaatgaatcctgatcgtgtgtatcttgacgatgctgaatatgcagatatgataaatgaaataagagaagcactaaaagaagaggatgcaggttaaataaaatgcaattaagcagggtcttgtttgactctgcttaatttagactcggaggtgtgtttatgctttcaaaaattctctcaaaagaacagtgcgctgactgcggtttttgctgtgttttcagaagaaccagtatttgggaaactcctcttttttcaaagtcagttattgaaaaactcaaaacaaaatatcaagattctgaatttgttcgcgtaggtgatttatatactatagatttaagcaaagagtataaaactgattctgatgatgaggaagcagcttgtttttttcttgacaaaaaaagtggctgtatgcttaatgatgatgaaaagcctctggactgtaaaatatggcctcttagaataatgaaggatgctgaacatttagttattgctttgaccccaacttgcaaggagattaataaattgcctgttgaaacagttaaagagtttgtccagtcggggattggtgaatatattagagataaagctatggaaatgccagatattataaaggaatatagaagtgattttccggtaataatgacattttctgattagtatacaaatgaaaggtgatttaatgccaagtttagaatttaagaggattgaactttcagataaagaaatagttaataattttttaaataaaacaaattcgaattcatgtcaaatgacattcgcaaacttgttttgtcttcgtgaaaaatataatactgaaatatgcgttcgggataatgttttatttattcgtcagaagaatagaaattttggcggtgaaaataatcaaattgcatattttgttccgataccgataggaaccggaaatcttgagtctgccataaatttaattattgagatatcgaggaaagaagggcatagaccttatttttttgctgtgaccgatgatacgaaagatgaacttgaaaaattagataagtttgagttttgtatagaggagcaggaagattgggcagagtatatttataaaagtgaaaaacttgttgatttttcttcatcagacctttcaaaacagcgtagggcagtaaatcgtttttggaatctctatggagaggaaaccaggattgaaagaatcagcgaaagtaatataaaacaattattaaagtatcaaagcaaatggcttaaagaaaacatagaaagaaatatggattctgattctttaataaaagaaaacgtttctatatgcaacgcgcttgaaaattttaatgagttagaccttgaaggaattataatatttgttggtaaatcaatcagaggctatggatacgggacaattttgcccggaggggcttttgatattatagcacagaaaggtgatataagttatcagcagatttataaggtagtattgcaggagcatgttaagacctattatgaaagagctgaattgactaatatggaggaagatataggtcttataggtttaagacgttcaaaaaccaggtatagacctgaatatatgttaaaaaaatatacagctttcttcaaataagtaattattatacaaaagacagggatagcatatatccctgtcttaattttgtttatataggaaaatcttaataaatcaataaaatttatctttgtcaacatgaagcccatacttctcgttatattttttgagctgctcttctttattcttttcaagttttatatcttcatgtatatcagcgaccttttgggtaaccatttcgatctgatgtttctcctgcatacggtctacaagagttgtgttgtagactgggtcttcatagtgagctgcttggtacttataaacaagtttgagcaatactggtgtgattattgtagtgaccaccacgacaattacaacgggagcaaagaactcctgaaccattaaaccaagcgctgcacccttgctggcgacaatcagtgcaacttcaccacgtgagatcatcccaattcctatctttgtagactgtagattagtatatccgcacattttagcaccaacgccgcacccgactacttttgaaagtatagcaacaattaataagaaaaatgtgaaagcgattatagccggtcccattgagttaatggtaacttttaatccgacgctggcaaaaaatacaggagagagcaacataaaagacaccgtatcgaatctggaaattatatatgaagtccttttagttcctgataatataagcccggcaacgaaagctccagttatatctgaaacaccaaaaaatgcttcagagcaatatgccataagaagacaaaatacaaaactcaaaacgctgaaacggcgtaaatcttttttataaccattcatccaaggcctaacaaatttaaaaaacagataagcgacaataccacagaatgcaaagaaagctaaaattttaataagtacaatcggtagacttatagtcggatcagcacagctggttattattgtgagcgctataatacctaaaacgtcatcaataagtgccgctcctaaaatagcattacctgaatgggtagaaagcttgcctaattctttgagcgtttcaactgtgatacttaccgatgttgcagttaaaataacgccaataaaaatgttttgcagcagcgtatttgggtcgcctgatttgttaaaaaagtaagctacaacccaaccgccaatcaaagggagaattacacccatcagtgctataaccgtagaggctacaccgcattttttcaattcttttatatcggtttcgagacctgcgctgaacattagaactatgacgccaagttcagatatagaagttataaaatcagtgctgtgaagccatccaaggcaagccggtcctaaaattaaacctgccagcagagcaccgacaacctgaggcatttgtatttttcttgtgagcaaacctaataatttagtgcttaacaatataagcgctaaatcaatcaaatatccatattccataatccctaccatccttataaattcatattaaccccaaaataacattatagcttttattttataaaaatatattgatgcagaacacaaattgatttaagcaataatgcaccaagaactatgatactactttttttagtttttgtctacctatattttatcgttaatgtgtttttttttgctattatttctgttttgaaaatatcttggaatataatgtataatagtataaaggtttgttatagtatatcaattataaaacttgttaattaatgattttattatttatatgtaataattatattgtacaacataatcaaaaatctgcataatcataaatacatcatgttgaaaagaccagcaaacgctggtctttttcgtatatttatgatgaaattatatgtgtaaaacaagaaagatattattgttacacttaacggcaactacacattatatggtgtaaataatatgttaaaatattatgtataactcgtcctcattgctccgcaagcggtcaaagccgttgtttttaccaaaattattttatattgtcaacaacctcaaagtaatgtgacaaatagctctgtcaaatagctttgaaaaatgaaactaattttatgtcataaattagtttttaagactatgtatcggtgcaggaatacgtccgccgcggttaataaatacttcactgctgtagttgtgaacaggcataaccggagcttctccgagcagtcctccaaattcaagagaatctccaacagttttaccggcagcaggtattattctgacagctgtggttttttggtttataactcctattgccatttcatctgcaataatcgcggaaattgttgacgccggtgtatctcctggtattgctatcatatccagacctaccgaacaaacacatgtcatggcttccagcttatctaaagttagagcaccgcattcggctgcggatatcatacctgcgtcttcactaactggaataaacgcaccgctaagtccgccaacatagcttgacgccataactccgccttttttgaccgcgtcatttaatagtgcaagagcagcggtggtgccgtggcatccgcacttttctagccccatttcttcgagaatgtaagctacgctatcgccaacctcaggtgttggagcaagtgataggtcaactattccataagaagagttaagcatctttgaagcttcgcgagctacaagctgacccattctcgttattttgaaagcagtcttttttatagtttcagatacagtgccaaagtcttcacctttgacttgctcaagtgctttttttactactccgggaccgcttacgcctacgtttataacagtatcgccctcgcctacgccatgaaacgctccagccataaaaggattatcctcgacaggattggcgaaaacaacaaattttgcgcagcctaatgagtcatcgtcttttgacatgtcagacatctgtttgattatttctcccatctctttgactgcatccatattaataccggctttagttgttgcaactccgacagaagaacatacatattcagtggttgaaagagcttctggaattgattttatcaattttttatccgattcggtatatcccttatatacaagagcggaatatccgccgataaaattaactccgagttcttttgcagccttgtccaatgttttcgcgaactgaacatagttatcagttttgcttgctgcggcaaccaatgatattggtgtaactgatatacgtttatgtataatagggataccatatctcctgctgataatgtttccagtttcgactaaatcttttgcacatctagtaattttatcgtagattttttgacatgctctgtcaggattctcgtctgcacaatctagtaatgatattcccatagttatagttctaatatctagatgttcatccctaatcatttttatggtttcggtaatctcatttgtatttaagtttatcatatgtatttcctttcggtggtttaaattctgtgcattgaattaaatatgtcttcatgttgaattctaatttcaactccaagttcttttcccaggccggccagtttatcagacagttcgccgaaatctaatttggttgagcttacatcgacgagcattaccatggtgaaaatattttgcattattgtttggttaatatcgagaatattaatatcgttttcatagagcagactgctggttttcgcaattatacccgtcttgtctattcccataactgttaatactgctttcataatttttctccttaagtatataattataatttatcttatgtttagagtaatggtctaaagattttaaaccattactctaataaatatattatcattaaattttaaaaaagtacagtacaatattacatcaatttaaaattgctatacctatattaagatacaatgcaaaaatgcaccataataaatatggtatcagcatataagcagatgctttggatattctataaaatgctaaaatgtttaaaataatcagagcaattaatattgtaagccatacagctgaaaacgtgtgcagtccgaatacaaaaaataaaattgtccaagcaaagttaaaaaacagctgtaagccaaaaattaaatagcataatgatttcttaggctgcggagccgttgagttagcaattccatacagtgataaactcataagaaaatataaaaccgcccatactataggaaaaaccacacctggcggtgaaagcggaggcgatgcgagatttgcatattcttccatagcgttttttgtcaatatttctgataaaaaggcaactccaaatggtatcaaaaatgacaaaatgagttttttcaaatttaatgttttaaacatacaaccacctcatatagtttttagtatattgtatgtttattgttataattgtattcaaccgataaagctagtgaacaaaaaatacgtcttatattagaccataattttttaatccaacagttattccttcattcaacacggtttctgttacaaaacttgctatattttcaagttgctttgtgtgttttcccattgcaataccgtatccaacagtttttagcatatcatagtcattatcaccgtctccaaaggcatatgtatcatttaagtcaagtttaaagtgcttcattatttgatttatacccgaagcctttgaaatgttttgtttaaccaggtcgccggaaggattggaacggtgtttggttatattatatttatctccaaaattttcaattagtttgctgaataacttgtcaccgttatacgtaaacatcattttatttgcctgaactatatttatatcttccggcattgggaagaaacagttcatgctaatattaaaatgattcatcatttccataaaactttcataattatttttactgtaatagcaggcgtcatgattttctgtaatataaccataattattttcatcaaaataacttattaattcagttaattcatttgttgtgagtttatcatttataatgtattctccgtttacagtggcacaagctccatttgatgtaatataacaatcaaagtcaattcctgtttcaggtacataacagcgtgctctgccggttgcaagaccaaccataaaattgttttcctgcagtttttgaatagaatctttagtagatttagtaggaataaagattttttcaccttcgtcaacaagggtaccatcgaagtcaaaaaataccgctcccctgtaattcttcataaatatatctccttatatcatgtttagtcgtaattcagcagactgaaatagatttacttaatctttaaatattctacctcaaactttaaatctttgcaatacattttttatataataggtaataaatctattaagaaaatttgcgcctattatgtatttatattgtataaaaatactatttataaaaatttttatatagtctgattttatataatttaagtaatatttttcttcgtattcttttttacaaatatgaaaaaataagtatggagggttattatgaaaacactaaaaaaatcattgacattaatatttataatttctttgttttgcatcacagcagaagcaaagacaatacagcatacggttgttaaaggcgaaagtatgtggaaaatagcggtaaaatatcaggtcggattaagtgagataatctcagctaatccccaagtatctaatcctgctttaatttatccgaatcaggttttaaatataccattgatggatgagtctataacctctttcgagcagcaggtaatagatttaacaaatgaaaaaagggcatcacgaggattaaaacctttgaatgctaattgggaattatcaagagtcgctcgttataaatctcaagatatggcaaataacaaatatttttctcataccagtcctacgtatggttcaccttttaatatgataaagaattttggaatcaaataccgttcagccggagaaaatattgcttatggtcagcgtacaccggcacaggttgtaaacagctggtggaattcggcaggtcaccgagcaaatatgcttaacgctaattatactgatattggcgtaggctatgtagcaaatggaaactattggactcagatgtttatacaaaagtaggatattttagaaatctcagaaagaaattttaaaacatgtgtaaaagctctcagccgagggcttttaatttgtttgaaaatttagattataataatttatttgacataatatattatataatgctataatcataacatgaataaatttttgcctatttctaaaaaagatttagatttaagaggaattaagcagctggattttgtatatgtaatcggtgacgcatatgttgaccatccgagttttggacatgcaataatttctcgtgtacttgagcataatggatatactgtaggaataatttcacagccgtcatggaaaagctgcgatgatttcaaaatactgggaaagcccagattgggctttattgttatgtccggaaatattgatcccatggtaaacagatatactgtttcaaaaaaggtcagaaatacagatttatattctccgggcggaaaaggcggaatgagacctgatagggctacaatagtatattgtaataaaataagagaagcctttggcagtgttccgattattataggcggaatagaagcaagtttgagacgatttgctcattatgattattggagcaataaagtaagaagaagtattttaattgacagcggagctgacctgcttatatttggtatgggtgaaaggcaaatagttgaagtggccgaacttcttgacactgaagttcctgtgagtgaaatcaaaggaattttgggaaccatgtatatagagaatgataaaaataatcttccatatgatgcaatttcgcttccgggatttgatatggtttcaaatgataaaaaatcttatgctatagcgacaaaaattcaatatgaagaacaggatgctgtcagaggaaaacctttagttcagcttgacaatgacagatatattgtgcaaaatccgcctgctgctcctttatccactgaagaacttgacgatgtatatgctttgccatatatgcgcacttatcatccggtatataaaaaacagggcggagttcctgcgattaatgaagtagagttttctattacttcatgccgcgggtgttttggaggctgcaatttttgcgctttaacatttcatcaaggaagaactgtaactgcacgaagccataagtcaataataaacgaggctgaactgttaacagaattaaagaattttaaaggttatattcacgatgtcggaggaccgactgcaaattttagattcccttcatgcgaggaacaacttcagagaggtgtgtgtaaaaataaacagtgtcttttcccgcagccttgtaaaaatctagttgttgaccattctgattatattgagctgcttagaaagcttagaaagttacctaagattaaaaaagtttttattcgcagcggtataagatttgattacttaatggcagataaaaatgatagttttttatatgaattatcaaaatatcatataagcggacaattaaaggttgctcctgaacacatttcagataatgttttgaaatatatgggtaaacctaagcatgaagtttttgaaaaattttccgctaagtataaaaaaataaacgaagagttaggtaaagaacaatttttggttccttatttaatgtcatcgcatccaggcagcactttaaaagaggcagttaagttagcggaatatcttagagatacaggacataatccggaacaggtgcaggatttttatccaacgcccggaagtatatctacttgcatgtattataccggtctcgaccctaggactatgacagaagtttatgttccaaaaacatatgaagagaagcaaatgcaaagagctcttctccaatatagaaaccctaaaaattataatttggttctgaaagccttaaaaaaggcaggcagggaagatttaattggatttgattccaaatgtttaattaaaccgttaggaaataaaaaaatatataaacctgatacaaagaggagaggataattatggcaaagattttgagcggtaaaattgtttctgcccgtgtaaaagatgagcttaaaaaagaggtggaagaactatcacagcgtggaaaacaaacaggacttgctgttgttcttgttggggatgattctgcttcaaaagtttatgtcagaaataaggaaaaagcttgtgaagaggtaggaatttattcagaagttcataggttgtctgcaaatacatcggaagaagaacttttaaaacttataaatgaattaaatgaaaatgataaaattgatggaatactagttcagcttccattgccaaaacatcttgatgataaggttataattgataatattaaacctgaaaaagatgttgatgcttttcatccaagtaatgttggtaaaataatgattggagattacgactttttgccttgtactcctgccggaattatggaattaatacatgaaagcggagttgaagttgacggaaagacatgtgttgttataggaagaagcaacatagtcggaaagccaatgtcaatgctgcttttacatgaaaacggtactgttacaacatgccattctcatacaaaaaatttagctgaagttacaaaaagtgctgacattcttgtggcagctgtaggtattcctaaatttgtaaaagccgatatggtaaaacccggtgcggtagtcattgatgtcggaatggatagagacgaaaatggaaagttgtgcggcgatgttgattttaatgaggttgagcctgttgcaggagcaattactccggttcccggaggagttggacctatgacaatagctatgcttatgagaaataccgttacggcttcaaaaaagaaattaggaaaataaaaatgaaacagggaagacaaaaagtcttccctgttaaaattttgaagttaaaaattgaattatataaataattattttaaggtataagctcataagagcatagcctcccaatgttcctgtaataaatcttctgatattgttacattttattatgtttttagattgtaaaaaccaatctaaaaacattgaaaaacaaaataatattataataaatatatttggtttataaaaaaatattaaacaaagagcggcaatccaaccaaagaatacgccggtacatctagaacatacaggaaactgaaatccattgataaaaaaacttctttcaggtatttgatgacattttgtcagccttccgaaattcatgagttttaaccaaagcttatttgaatcaaaatttttatccattaaaacgtcttccgcaatttctgcaaatccaataggtacggttagttgacgtagttccgctgttacaagctccgcataaaagacccaaaggaccaaacaaaatatatccgcagcatccgcttccggggtcgtatcctccgccggaaactttagtttctgtcattggctgacaattattacttccgcaatgaggacactttatgcctgaataaccatttgcttgttcattatttgaagcatttttagtacctcctacaacttctgcatcatattcaggcacactggcaggttgtccgcaatttgggcagaaagttgagttgcccatatccgttccgcattttttgcaatacataaatttcactcctaaatctacatcaaggctttactaaatgttattgaatctcatctaaattatatggtgttgtttggtatacaaaataattcagccaatttgaatataataagtttgcgtgagaacgccacatcataagaggttcttttaatggatcattatccggaaaataattttttggcaaattaatatcaatacctttggctttatccctaaaatattcatttgctaatgtaatattatcatactcagagtgtccggtaacgaaaaattgacgtccgcttttagctgatactatgtaaacgccggcttcgtcagattttgataaaatttctagttctggaaccttaacaatatcagattctctggtttctgtatgtctggaatgaggggcataaaacttatcgtcaaatcctcttagaagtatcttatgtttttcttcaggaagcacatagtgttcaaaaatgccaaaaagtttatccttcatttcatattttggtatcccataatggtaataaaggccggcttgagcgccccagcaaatatgaaaagttgatgtaacatttttctttgaccattccatgatttcgcaaagctcatcccaataatctacttcttcgaaatccatctgctccacaggtgcgcctgtaattatcaaaccgtcaaattttttgtctttaaatttatcaaacgtatcataaaatgtttcaatatgactttttggtgtattttttgattcatagctctttgtgtgcataaaactaatgttaatttgaagcggcgtatttccaagaaccctgagaagttgagtttcagtttctatttttttaggcatcaggtttaatattactatttcaagaggtcttgtttcttgcttaagagctctagtctctgtcattacgaatatattctcactgttaagagttccggttgccggaagagtatctgtaacttttatcggcatatttctcaccaccatttattttgtattctcgattataacatataaatttatactagtaaagcaattttatattaataattttataaataagcagaatgattttataataagcagatttaaaatattatttactttattttataatacagatttattattctaacaaaatatataaaatattagatataatataaaaaactaaagagtaacatatagattttatattgaaatattttcagtttgtttttaatgtatatttcaagtctttatatttatataaatataattatgataatattgtcatgcgtattttttattgttaaatttaaataactatttgctaaatatgtattatgtaaaatttttaataacagttactttttatgtaataaaatatataattactattaaatttctacagataggtgtttgttatttaaaataaagaacagctaaataatatgatacggttttaattatatattaaacaaggtgaaacatgataattttctagtttgattttaaaatacatttatgataaaatatgttattattagactgtttaaatattaaattttaaggaggattaaaatatgaaaattgctgttttatatcaaaagaatagtccgcctgttatcaaaggaataaaaaaaccgatgaaggaaggcggatacagcgacagcggagcggatatttgctattgtcttcaaaaacataatattgatgttgtgactcctgttaaacatcctgatatgctaaaggattttgattgggtttttccggatactaaggaaggaatacagaatgcaatttctttgggcgcagacacaatatggctaaatacagttttatatgacaatcatccgattgaaagttttaacggtattaatattataggtcagcgtccgtcagatgtgtcaaaatatgatgataagtactatacaaataattatttgagaaatttgggatttccggtagtaaagggtgttttgcttaataaagcgagtaaatataacggagattttccttgtgtgataaaacccgttcgcggcagaggaagccagggagttgtgaaatgctgttcagctgaagaactttacagtgctttaaaaaacctgattgatagtggaatctatggggatgaaatgattgttgagccgtttttagatggaaaagaaattactatttctgttttaccaaatggcacatgtttgccggttgttgaaagatttaaccattgcaatggtatagctccatataatggcgttgttgcggtttctaaaaatagccgggccattttaaaaaataatgaaagtttaaacaaaatttctgaagcctgttcaaaagctgttatttcaatggatttaaaagctttagtaagaattgactgcagggagaacatccatggagaatatgagatgtttgattttaatttgaaacctaatatgaccggagcggttagacctcacagattagaccaggatagtcttacaatgattgccgcctcggctgttggctggtcgttttatgatttactaaatgagttaatacaaacaaaatggcagttataattaatgttttaattttatacgtctaacaaagtgtttttatatagtttgtaaataatttgggtaaatcgtaaaataatataattatcaaagaaaatattaaattgttaaattgaacaaattacttttaacttaaaaatatgaatttatgcagttatacaagattggataaaatcattaaatttcaaataaaaactagtataatttcaaaatttctacttgacttatcttgaaaactcttgtattatagtaatgacaactgtaaagtctcagttaattttttgcattaaaaggagcggtattatgtacatgaaagaggtagtagttcagaatcaggttggactccatgcgagaccggcaactttctttatacagaaggccaatgaatttaagtccagtatttgggttgagagtgaagatagaaaggttaacgcaaaaagtctgctgggtgttctttcgctcggtattactaaaggtcttacgatcaccataattgctgatggtccggatgaggaagacgctgttaataacttggttgatttgatttcttataattttgcataaaccgtttggttaaaatatactaaaatttgagtgaactgttttcacagtttactcttttttgatacataaaataaaatgtggggtgatattaatgacagaagatattatgtgtagaataaaagaaaaattaaaaactcttccaatgtcacctggcgtgtatttaatgaaggataaggacggaaaaataatttatgtcggaaaaagcaaggttcttaaaagcagggtcagctcatattttataaattcgaaaagccatactgtcaaaactgttaaaatggtgaatcaggtcaatgattttgactatatattaactgacagtgaggttgaggcgcttatacttgaatgtaacttaataaaaaagtatatgccgaaatataacatactcttaaaagatgataaacaatatccgtatattaaaataactgtaaaagaagattatccaaaaatatttgttacaagaagacttgtaaaagacggttcaaagtatttcggtccatatatgagcgccgccaatacaaaagaaactcttgacacgattaaaagaatttttaaaataagaacttgcaatagggttctgcccagggatataggaaaagacaggccatgtctttattatcagattggtcagtgcagcgctccgtgtgcaggaaaaatttctcaggaagaatattctgaaatgtttaataaaatttcagatgttttaagcggcaactattcaatgttagaaaaagcattgactgagaaaatgtacaaagcttcagataatttagaatacgaaaaggcggcaggttatagggacagaattaataatctaagagcacttgatgaaaagcagaaaataatatctacaaatgaggataaccgagatattattggcgtgtacagagagaataacgactgctgtgttcagattttttatatgcgaggcggaaaaatgcttggttccgagcactatgtttttgaaaatagtgacgatacattggaagaacttatttcgggatttataaaacaattttattttacggcaacaaatatacctaaagaaattttgattcccgtagagatagaagattctgaagaaatagagaaatggctatctgaaaagagcggacataaaatacgggttcatatgccaaaacgcggggataaagcgcatactattacaatggttaataaaaatgctgaggaatctttaaaagttcataaatttaaaagggacagggagcaaacaaatcaaaatgctgtattaaaaggactaatggaattgcttaagcttaaaagcacaccttttagaattgaaagttatgatatttctaatatttccggttctcaaagcgtaggtgtttgtgttgtgtataataatgcgcgtcctcataaatcttcatatagaaagtttaacataaaaacagtggagggagcaaatgactacgaaagtacaagagaggttatatttcgcaggatatctaaagcatatgaggaagaggacgcaataaaatcaggaactctgcaagatgataaagcaaaatttctgccgcttcctgatttaattttattagacggcggcaaagggcatgtccacgtaataaaagaactgtttgaaaccatgggagaagaaatcccagtatatggtatggttaaggatgataaacacagaaccagagcgctaactgatgaaaatcaagaattttatattgataaagacagcgagttatttaagtttcttacgggtcttcaggaggaagtacataggtttgcgattactgcctttagaaaaaaacatgaaaaagccagcgttcacagtgaacttgatgatataaaaggagttggtccggcaaagagaaataaacttctattaagtttttcatctattaaaaaaattaagaatgctacagtcggagagttatccgctgttatagaccctcaaacagcaaggaatgtatataaatattttcatcctgaaaattaaaaataaataaaaggctaagtaattttgtaaaccgaacaagcatataaatcagtgaggagttgatttatatgtcttttgacttaagaagtattatcgtttacatatttggcctttttttgttttttatgtgtattaagttattcaaaaaaccgctgatttggatttttaggctgatgattagctgtattattggtattggaatacttctgctgtttaatttaatatttcaaaaagccggctttactttggcgctcaatccgtttaatgcggttacaataggcgtattagggcttccgggacttgttttgctatgcgtgttgtcatgtttagcatagcagcggtattgtgttaaaagccacgtagattttcataacttattaagtccagcatttgttcaagagtatcacactgattaataagatttctcagttttgctccgccgcacaaacctttaaaataccatgccatatgttttcttccctcaagaacgccgcggtgttcgcctttaaatttcactaaaagccggagatgtttttcggcaatgtcagaacgttcctcaagtgtaggcggagcaagttcatcaccggttttcagataatgaagcacagaactaaacaaccaagggtttccctgagctgctctgcctatcattataccgtcgcatccggtataatcaagcatatattttgcggatttgccgtcatgtacatctccgttgcctattaccggtatttttacagcttcttttactttttttattatttcaagattcgctttgccggaataaaattgtgctctggttcttccgtgtattgttattgcgtcagcaccgttgttttctgctgtttttgcaaactcaactgcgtttatactgtcatcgtcccagcccatcctgaattttactgacataggacaattgacggattttcttactgcactgataattttacctgccagttcaggatttttcattaatgcactgccgtcaccgttatttacaatcttaggtgccggacaacccatattaatatctatcatgtctgccccaaattcaagtgagcgttcagcaatttctgacattacttcaggttcgtgcccaaaaatctgagcggcggtaggtttttcaaaattcaaaacttccagcaaaacctcagtccttttatttttatacagaagcccctttccggataccatttccgtatacatcaaagcaggaccgaacggttttgttatgagcctaaacgctttgtccgtcactccggccattggtgcaagtattatattgtttttaagatttaaagttcctattttcatatcgtttctccttgcggatattatacactatatattgtgatttgccaatatgaaatattgacataaagagacattattgatataatacccgggttagattttaacaattatgaagaatgaaatttaagggttgattattttgaaaacaaaaagaatagtaataaaggttggaacttctacgcttacccatgaaagcgggaaattaaatctggagagaatagagcagttggttcgtgttatctcaaatattaaaaatatgggtcatgaagtaatattggtctcaagcggcgctattggcgtcggagcagggaaagtaggtttgaaagagaagcctgattcagtcagaatgaaacaagccctggctgctataggtcaggcaagtttggtttctatttatgataaaatctttaaagaatacggatacagcaccggtcaggttcttttaacaaagtttatccttgatgaggaaaccagatataacagcgctcgcagggcttttgacgctatgatttcatttggcgttgttcctatagtaaatgagaacgatgtgatatctacttatgagatagagtttggtgacaatgatacgttatcagctacagtagccgaacttgtcagagccgacctcttaataattctttcagatattgacggattttatgacagcgacccaagaaaagataaaaacgcaaaaattattcctgtggtatcggaaatatctgaggagattatgtcgtgtgcaggagcggaaggttccagccgaggaacaggcggtatgaaaacaaaattaagggctgctaagtttgtgaatgataatggtatagatatggttttattaaatggaaatgttcctgaaaaaatctatagagttttagaaggcgagaatattggaacattatttaaacataaagaaaaataattacaaataatatattggaactttttccatttttttacgtctaaatactataaaatctatcgggaggtatttttgtgcgtaaaaaaatatatggtttgttttttccaaaacttattattgctttgctggtactggctgttatagcggtttggagcagtgatttgttttctgataataaatataatgatgtatgtgcagataatgagtattatgggcagtattctttgtcatatatgccaatttatcttgacggatatgaaattcaagggtattactgcgatgaaaaagtcttaatttctattgatgatatgactagatatggtttcgaattaaattatgactcagagaaaaatgtgcttaatttgaggtcaacatctgaaattgctgtatatccatataaacaatcaatagctgtttcaaattacatagctgagccgtccagttttgatgtgcggataaatggtataaaaatatatgcatattgtcttgatggatatgcgtgcgtcagcgttgatgatttggtttatttaagcgatgaatataacatacaaaccggttggtctgattacaatatgtgcggcggttatgacgcttctgccaacgcttttaatataaactgttttaggtttaaggttaatgattgggctgaactgcttgctcaaatggaaagcaaagtaaatcagactgagatagacatatatactgaaggaaagcctgaagaagcaacatattacggggctaagctggaacccagaagcggtatatatgcaggtatagtcagcgacggcaacggaaatcccgaagacggttcgccggaaacatttcatcatgattttggagtgtattcatcatatttagaatttgatgattttcaaacccagcttaataagcccagcagttatattgtcccggagaaaaactgtataagtcaggttccctggaatgttgtggatattaatttggttttggacagtgcaaacgatgaatacattaaagaaacattagataatatggctaaatataataagccgacaataatacgttttggcgcggaaatgaatataggatacctgggggattctcctacagcatatataaaagcttttagaaagattgcggatatggtacatgagtatccaaatttcgctgttatgtggtcgccgaatgacaatggttccctggacagaccgtttggatatttttatccaggtgatgaatatgtagattggataggagtgtcatcatttttaaagaaagattttttaaacagcctggctgttgaagatggttctgaggtatgtactacgcgcgaatctcagatatactttaccttaggtgattttggctatacaacgaattcacttaaatatataactgattttatgaaagaaaataatattaataagccgcttgccataagcgagggcggtgttgtctctcgaatctcttacagtgatgaaaacatagatttgtggggagaaaagcgggtcagaaatatgtattggtatgcagctatgagattcccgcagctaaaaagtattgtatattttaatcaagatatggaatcagaagttataggatttgacctttcatttaaacctaactacacgcaaattatagaagaagctattacaaccggtccatatctgctgtcatataatgaaacgcctaaatatacatttgttaaagcggacggcggaagaacttataacagcgattatattccgatatacggatatgtctatcagccggaacagtatacgaattatgtagagtattatatagatggaaatcttttggatacgaaaacagaaattccttataaaacatatttgaataaaaattctatttctgacggaactcatactttaactttaactgctcacggtgcagcgtcagaaatatcaaaatcttatacattagtaaaagaagcagggaatatagtaatctattaataattattaaaaaaataactcgttgtgttaaggcaacgggttatttttaatgtataagatttaaattaattttacttaaaccgaagtgttattaataagctttattatttatatttgtgacagttcataaagtttgtcaaaaacaatttcgcggtcccagatttttaccgccttttctatattattaattccgtttctgtttttcgccagcggaagttttgaagtagattttgcgttatgaaggagttcctgtccttttttattaaaattcaatattttaatatattgaggaggcgttacagcgtcttcttttgttattcccaaaaatatattcattatgattcgtctgattctgctgtgtgcataacgttttgattttatattatcacataattcagaaaagtttttcgaagaaaatgctgactttttaattttattctctaatccctcagagacgtcaggagtattccgaatcgcattgatgtctgattttattatatttgatattatagcagtatctaacttttcaatcctgtggagagatgaatttttgtataatgaaatacagttttcaggaaccgctttaatcatatttgagccatgggtatttaatatatttcttatagcgcttgcgctggctatctcgccatgaataacggtatcattatgctccgactcatatctctttattaaaataggttcaatattactgtttaatttgtataatgctttgatatattcaatagcaagaatattattgggttcacttataatattagcatagctgtttcctaaaattctgtacacagcgttttttcttgctaaaaaaaacggctttcccgactgaagttctgattttagaatcattttaaattcttttggttcagtgtatagcaatgaagcagttttttgtatttctattatttcagaatgttcggcgccgaaagctatgctgtcaataagccccaaagaatgtaaaatataaattgaattaaacgcaaaaatttcagccgactgcattgaatgaacagcaggcagttctaacacaagatccatccctgattgaacagccgccaaggctcggacagatttatcatacacagccacatcgccgcgctgtgtatagtttccgctcattataccgacaacagcgtcaaaacctaaattttgttttatatagtcaatctgatatttgtgaccattgtgaaaggggttatattcacacacaattccgcagactttcaattattattcctccaacataaaagagcaatttttataaaatataaactaaataaaattatatcttactaatgtttatatgtcaatataggctattttatttcagaaaagctgttttatttaaaattttaatgtaataatttaaaaaactggttataagtattaaaaaaactatggtttataacaaaattttttatatttaatacttgaaatcggctttttataggtgtataatgtaacagctaagtatcaaaaattaccatataaactggaatttttggcttattatgattttgtaaaataattatcaatatacacataggaaatgaggtttaacaaatgtcaaaattcatggacaagattaaggaaactgccagggcggataagaagactattgttcttgctgagggagaggaacgcagaacgattgacgcagcagcccaaattttaaaagaaggatatgccaatatcatacttttaggcaatgagtctaaaataaaaagtatggcggatggacttgatatttctgaggcaactattattgaccctgacacaagcgaacttacagaagagcttggaaacggactttatgagcttagaaagaaaaagggtatgctgccggctcaggctgctgaaaaagtaaaagacgtattgtattttggctgtatgctggttaaaacaggcagagcagacggcatggttgccggcgctgttcacgctacagccgacgtaatgagatcgtcattgcagacaattaagactgctcctgacactaaagttgtttcagcatttttcttaatgatggttcctgattgtgaatatggaaataatggaacatttgtattttctgactgcggacttaacgaatatccggattcagaaaagctggctgaaatagctatttcttcttcaaagtcttacaagagtcttgtaggcggagagccaaaggttgctatgctttcatattcaacttacggaagcgctaaatcagaacaggttgatttggttaagaacgcagctgataaggctaaagaattagctcctgacttaaagcttgacggagaacttcagcttgacgcggctatcgttccaagcgttgcttctttgaaagctcctgacagcgatgttgcaggtcaggcaaacgttttgattttcccgaatcttgacgccggaaacattggctataaactcgttcagcgtttggcaaaagctgaagcatacggaccaatgactcagggaatggcaaaaccggtaaacgacttatcaagaggatgcagtgcagaagatattgccggagttgttgctatcacatgtgtgcaggctcaaaatcaggattaattatattatcggagggtgtaaaataaatgaaagttttagttattaacgcaggaagttcatcgcttaaatatcagcttatagaaacagaatcggaaaaagttttggctaaaggcttgtgcgaaagaatcggtcttgaaggctcaaagcttacacatagccctgagggaaaagaaaaatatattgaagaaaaaccgatgccaacccacaagactgctgttcaaatggttttggacgcacttgttgatgaagagcatggagttattgcagacataaatgatatttccgctgttggtcacagagttctccatggcggacagtattacagcgactcagttgttgttaacgatgatgttaaaaaggtaatcaaagattgtttcccattgggacctcttcataatccggcaaaccttattggtattgaggcatgtgaggacgctatggccggaactcctcaggttgcggtttttgatacagcatttgggcagagtatggagcctaaggcgtatatgtatgctataccatataaatattacgagaagtatagtattagaaaatatggtttccacggtacaagtcataagtttgtttccggcagagcaattaaattcggggaattagataacagcaactgcaaagtaattgtgtgtcatttgggcaatggcgccagtatttctgcttctgtcggcggaaagtgtgttgacacaagcatgggccttactcctcttgaaggtttgataatgggaaccagaagtggtgacattgacccggctgttgtacagtatattgccaataatgagaatttgtcagttgatgaagttttgaatatattgaataaggaatccggcgttttaggtatctccggagtatcaagcgacttccgtgatttgtcagccgcagcacaggaaggcaataaaagagcacagatagctcttgatgcgtttatttaccgcgttgcaaaatatgttggttcatatgttgccgctatgaacggtgttgacgcgatagcgtttaccggaggaataggtgagaacgactgtgataccagatataaaatttgtcagtatttaggatatcttggcataaagattgatgaggaaaagaataaggagagaggtaaggaaatctacatttcaactcctgattcaaatgtaaaagttatggttattcctacaaatgaagagcttgcaatcgcacgtgagactttggatttagtaaaataattcacttattggttaaggctgtctcgattgagacagccttgcttttaaaaatgaggttgatattatatggctttaaatgattatgaaaatatgaccgatgaagaaatagtagctttagcggaaaaggataggtctgctgaggagttcttgctgaataagtataaaaatctagttaagtccagagcaaaaatgtattttttggcgggtggagacaatgatgatttgatgcaggagggtatgataggcttatttaaggctatacacgattataattcggataagcaggcatcgttttacagttttgctgaactttgcgtcaaacgtcaaattttcactgctataaagacggcagcaaggcagaaacatcagccccttaatacgtatatatctttaaataaacctgtgtatgaggacgtctctgagagaactttagttgaaaccttggcagaaagggaatctgtggaccctgaaaagctttatataatgcatgaaaaattaaaagatatagagaaagaaatagatgaaaagttgagtgatttagaaaaaagagtgttgattttacatcttcagggtatgtcgtatcaggaaatttctgaaattattaataagcctacaaaatcaattgataatgcgcttcaaagaattaaaaaaaagctggatgaaaagtaaaaacaattgtagagcaaaatatctgtagtaattttcaaaaatttatttataaattagaatttttttgaaattttacacttttattttattatacttttctttaaaatttaaataaatttgtgttaagaaatattattatccacttttagaatatcccgtaaaatcagttatcaacagagttattcacattatccaccgtttttgtatagtaaaaataactaaaatcactgatttttaaaagttatccacaatttgcgtttttacgggcaagtccctcacttaaataaaaaattttgtttaaatatatttttatgttttatattcacaattatttaaattattaaaaaatacagatatattgtcctttttaatgttgttttttgtctactgagaaagatattattttaaattaaaccagttttttcataaaataccttgaactttgcaagactttaatatataatatcttaagttatattttttaagttaattatgttaattattatttttatatagaggagtatagtatgaatatttataagttatctgaactgacatctgaaaagaaagaatttataatgaagcgcgctgaatctgacatttctgaacaaatgaagattgctaaagaagtttcggatgatattagaaagcgcggggatgaagcagttttagaatataccgctaaatttgaccatgtaactcttagcgcggatgaaatgaaggtaaaacctgaagagattgaggcaggttatgagcgcttggatacagaaaccagagaagcaattgaatatgccgttaaaaatattagaaattttcattcaaagcaaatgcctgaagagatgtggtttactgaagtggataagggccttttggttggtgaaaaaactactcctatcgtagatgtttgtctttatgttccgcggggcaagggaagcttcccgtctgttttatgtatgttggctacacctgctgttgttgccggcgtagaaaagattgtagttgttacaccgcctaatgaggaaggaaatgttgatgacgcaattcttgcggccgctaaaataatcggcgttagtgaaatatataaggtcggaggaattcaggcagtcgcttctgttgcatacggaaccgaaactattccaaaatgccataagataataggacccggaaacgcttatgctacagcagcaaaaagagttttgtccaactatattgattcaggtttgccggcaggaccaagcgaatgtataatacttgctgatgaaaacgccgaccctgaaaaggtggctttggattggatgattgaagcagagcatggaccggattccgctgcacttttagttactaattgtgaagaactggtttataaagcggctgaaattgttgaaagacagctcgaaaaaatatctgataaaagacgtgagtttgtaactgcgaatttcaatacatacggcggagctattataactgaaagtcttgaagagagtattgattttgtaaatgactatgcaccggaacatatggaagttatgacaaaggaaccgtttgtggttcttcccaaaataaaaaatgcgggagaaattctgctgggagattatactccggttaccttatgtaattttgttttaggtccgaatgctatcttgcctaccgggcagtttgctaaaacctattcaagcgtttctgttatggacttcttaaagcgttcttcggttggttacgcaagccgcgacggctttgaaatggtcagggattatgcgtataagattgctacggtagaaggctttgatacccatgctttagcggttaaagaaagaaaataaaattgagcgtacgcgaggattttactatgaaaaataggattactgtaaagagaaaaactactgaaacttcaattgaggtagtgatagaaaaaggtgagctgaagcctgactatagaaaatatattaaaacgccgctgccatttttgaatcatatgattgagcatattgcgtggcgcgcatcacttaatatcagcattgatatggattttgacgaatttgaactttgccatttagtgtgtgaagatgttggaatgacacttggaaaagctgtcggggaatatataaatataaattctccatcaggttatggttttgcaaccggtctcattgatgaagcgtgtgcagatgcggcaatttcatttgaggacagggcgcagcttacgtttcaaaaatcaataaattattgtgagaatgttgaaggaatgccaagcgaagagcttattacttttcttgaaggatttgctcagggagcaagatgtactctgtttattgatttaaaatccgggcagaacggtcatcatatctgggaagcagttttcagaggtgttggaatcgctctcggtcaagctttgtcatttgattcttccagagaagggttaacctccggcgttgcaggaaaggtagaatatgaagtttcagccgaataattttgacaagataatatttgatatggatggggttgtaacaagcgaatatatttattgggatgcggcggctttaacggtatatgagcttttatacagccataaattctatggattgagtgagatagaccataattggtgttacggcaactttaaagagcttcacaaaataattttttgcggagataaaactataaaagccgtgaaagcattaggagtaaatacaaattgggatttagcttatatagttttttgtgtttcaaaatatttggagccggatttgacagaattcaacgaatggcattttgagtcagttcgtatgtttattgaaaatatcacggttcaggctcctgaggtctacaatctcgtgggtgaacttgctgctgtatctttaaatagtgagttttccggttttaagcgaggcaggagcaagttatgggatgatgttattaactgttttcaattatggtttttaggtggggaatcagttcccggtcttaatactatggaaaaacctttggtagatttggatgacttaaaaaagactttttcagatttaaagcgcaggggaattagtttgggaataggaaccgggcgtccaaaagatgaaattttgtttcctatgaaaaagtggggattaatggaattcttttctgacaatatgattgttacatatgacgacgtgttaaaagcggaagaagattttaaacccgaaactcctttgtcaaaaccgaacccgtttgtgtttttaaaagcagcttttggagacgaattggatgatgagaaattaatatccgataattataataaagataaatgttcaaaaattgctgtaattggagacgcgccaagcgatttgatggcagcaaaatcagcaggtatggtttttgtaggtgttcttaccggtattgataaggaatctgctaatgaatattttttaagccataatgccgattatatatttgaagatgtaacacaacttattgacgattaaatatttttgtggggattattatgcaaataaaaattgaaacaccattaacaagtgaaaaggtaaaatctttaaaaagcggagacagcgttctcataaccggagaaatttatacagctagagacgcggctcataaaagaatgattgacgccttgaaaagcggagaaaaactcccttttgaaatagaaaataaaataatttattatgccggtccaacgcctgcaaaaccaggtcagattattggttcgtgcggtcctactacaagcggaagaatggacgcgtatgctcctgaattgataaaattaggtcttaccgggatgataggcaagggtgaaaggtcagacgatgttgttaatgcaatgaaagagtatggagccgtatatttcggagctataggcggtgccggcgctttaatagcgaaaagtattaaagctgcagagataatagcttatgaagaccttgggactgaagctgtcagaaaacttactgtagagaactttcctgcaattgttattatagattctaatgggaaaaatttatatcatgatagataataaaaaataccggtatgaaaaccggtatttttttaatttttatcaaatattttattcatcatatttttaatattttcttttcttaaagatgtttcatttctgtcaattgttatattaattacatcgccttcacgggcttcgggcggaatcaattcaatcggcatatctgcaaatcctgaaccttcatcaaattctacaactgcaaagtttccttcaaatctatcaataattattttcatttaaaatatctcctttaatattctctatatacattattgccatcgcttgcaaaaattattgttccgtcagtatcagttctgaacgtctttatacccatattgtttaaagtatttaaagtttgttctgtaggatgaccgtatttattatctgcgccgcaggatataaccgcaaacgtcggatttaccttgcttagaaacgcttgctgactggatgaagaagagccatgatgtccaatcttaatgacgttagcccaaagagattcaatgttatagcttgataatatttcattttcagattcaatctctgcgtcacccataaacaaaaacgctgtgtttccaaatgctattcttactacggcagaataattgtttaaatctttatattcgttactgcttggagccagtataaaagctgacattgtatcttcattgaatattgtaactccggatttagcttcaactacatttatatttttctctattatagtgcttaagaattgctcatatgttttggtagtggttacggcgtttggcatatataatgtttcgatttcaaaattgttcagaacttcattcataccgccaatatggtctgcgtgaggatgagttgcaaccaaataatcaattttattatatcctaaattttttataaaactgcatatttcttcgccgtatttagaagttgacgcgtcaatcagcattgtttttccgttaggaagcaaaacaaattcgctgtcaccttgaccaatatttaaataatacacttttacaaacgaattgccaagcgcaacatcgcttggcaactcttcattgttattattgactaaatccacatatgctgtattatcattaggaaaagctctgtatagtattgctgcaacttcgcatcgtattatagggtctccgccttgaaatgttccttcttgagtacctgttatataaccttgtttaacagcttctgctatataaggacgatcttgtttaggaatggtattataatcgtaaaacacatctgataacaagctgtcatcaacaggataatattcggaaaggtcataattcataactttcattaaagcaactgttacgtcctcacgtgtagcattatcccaaggcttgaaatacagtcttgaatctcccggagatgtgctttggtatccaggcatttgctgagttattgaattgatataaggaaaagaccagtcattaacatcaacgtctgcatatgggcttgtgcgttttgtggaaagtttaagtccggacgcattaacaagcattttggcatattcacatctggcaacatagttctgaggtaaaaaagttccgtctccataaccggaaataattccgcgtgattcaagatttgttatgtaaggcgccgcccaaaagtcatcaggcacatcataaaacgatgttgcatatgctgagaaactgccgaaacacataagtaacgtcaaaactgcaatagtgacagaccatgtaactctttttcttaacattacaaattctcctttttcgtttaacaatataaatattatctaaatacaatttcaagcaaggattatatcattagtcttattatttgtcaagttttacggaaaaatggagctataataagactattaattattttatattataatatgactgattcaacaagacaaaagttcctgtataagcaaaaattatttattgctgttgcaaaaaataacatatataaacaaagtaaagtgttataaaataaaaaatttaagtttgatattttttgttttatactttggttatagataaaagtatattgtttagaaacaaattaatttttatttgactttattttcaatattttatataagaataaaattaatttccgtactcaatacttatctcgttaaatatgtgcaggtagtcatcaatactttttttctttttttcttctgatttgacatctataactatatttccttcatgcatcattatagttctgtctccgtatgtcacagcgtgtttaagattatgcgtaaccataagagtagtaatatttttttcatctactactttttgcgtaagattcataatggtgtcgcttgatttggggtcaagcgccgctgtatgttcgtccaaaagcagtaaatcaggttttgataatgttgtcataatcattgacagagcttgtctctgacctcctgaaagagaacctgccaatgtatccaatctgttctcaagtcccatacccaataattcaagctgttctttataatattttttgcgcttatgatttaaaccccaagataacccaaatgattttcctttgttatcagctattgacagattttctaaaattgtcatagaagaacaggtgcccatagatggattttgaaaaactctgcttaaatattttgcacgctggtaatttttttgtttaactatatttttaccgttaattattatttgtcctgaatccgctttaatatcaccggaaataagattcagtattgttgttttcccggagccgttagagccgattatacatacaaattcacctctgggaacgctgaggttaaaatcattaaatattactttttcatcaattgttccccggttaaatgtttttgaaatattttttatttcaagcatcaggtctcactccaattcctttgtctcgtttaaataatatattatttataatcaaaatcactataaataggactgtaataaccaggtttgtatctgttgccatcagccctgaagcaatagcggcgtatgttaaagtcttatatattatcattcctataataacgctggtcgtgatttttaaaaacctcattttcttaaaaatagttgctcctataattactgcggctaatcccataactaccgttcctgtgcctcctccaacagaaaactgtcttgtatattggcagtttacggctcctgacagtgcaaccagaccgtttgaaatagccagtccaagtatttttatgtttcctggatttttaccaagggtaacaacaagactttcgttatcaccaacgcttcttaaaagaaatcctgattttgttctgagataccagtcaagaagaagttttgatactatagttataaaaaacataataataagcttgctgtataagttaataggggctggaagcatacttgaaaaactggaaaatatagtattgtcagtcatacttataaaaactgttgatgagccggctattctgtaattaatggagtataaggcggtcatagttaatataccgcacagcagatttttaattttaagccctacatttaaaaatcctgtaaatgcccctgcagcgcagcctgataaaaatgctaatattaaacttagccacggatctattcctgcggcggaaaccgttatacataaagcggctccaagcggaaaagtaccgtcaacagaaaggtcaggaaaatctaagattttatagcttatatatactccaacagccatgacaccataaataaatccttgctcaagtatgcttgtaactataccaaccatatatttatctcctaattactttttttcagcatttttcaaaatatcatcgggaattactatattcaaatttgctgctgtttcttcattaactgcaatttcgctttgattaattacctcatatggtattgtgctgatttcttcaccttttaatattttagaggccataattccggctttttttccgagttctatataatcaacacctgctgaggcgagacatccgcctgtcacttgtctgctttcggaaccaaatatcggtatattggcggcattagccttttcaagcataacagggagattatttacaacgatgttgtctgttagattagatatgcagtcagcttgtccaagaacaatatctatcgcctgagaaatttctgatgcgttgctgatacctttttctataatctcaaaaccaaattcactggctttttctttataaatgttaagagtgctttgagagtttgactcatttgttgtatatattattcctattttttttgcgtcaggcagaatttttcttattaattcaagctgcttttctacaggcggctggtctgatactcctgtaataccatccataggttctgtttcgcttttagctaaatttgctttaacgggatcagatacagcaccgaaaaccaccggtattttattttcataacaataattatatgatgtcattgccgatggagtagctataccgaaaactaggttaacttttgagtttacaaaattttgaactatttgtgtgtttaatgaactgtcaccctgagcggatttctgaatgatttctaagttgtcgccggacacaaaaccttcatttgcaagtccttctataaagccggttttgcagtcttctaatgttgtatggtcagcatattgtactattcctattttatatttatctgattgttgtttttttaaatcattgccgccgaaatttgagcatccggttataaaaagtatagatataataagtgcagataaaataaacttttttgaattcataagctgctcctctcaaaagttaagtattaaattttccataataaaaaacaccttatttattaagtattccaattacataaaaatacattcttaaattttatatttaaaattttatggctaaaaacttttattgtttatttgattttaaaaatatatttaattatttttttacgtataaaaatattttattttttggagtatttataaatatttattaaatgtataattaaatcaattttaaagtgtttatgtcacattttatagataaaatatatgtgtatgtattttttatttattttctacaagaagaatatattttttttgtcaacattgcttattgataaaaataaataactgagttattataagtttgtagatttcataatatatgcagcctccccgctgcacaaagactgtgtcaaattggcgcggtctttgttttatttatattttaaatattgattgattttatataatatagatgttataatattttttaatgcattaattttttattaaaaagagaaaggagttatggcatattagtatgccatatgtttcaggaatgagattttatgaaatagttttaattgctgttggtcttgctatggatgcttttgcggtttctgtctgtaaagggcttaaaatgagtaaagttgactataaatatacttttatcatagcattattttttggagtatttcaagctgcaatgcctattataggctggtttgccggaaaacagtttgaggcttacataaccagtgtcgatcattggattgcttttatattgctggcgtttataggcggtaaaatgatatacgaagcaataaaaaatgaaggtgaagggtgctgtgatttaaaatacgattttaaagaaattacattgcttgcttttgccacaagtattgacgcgctggccgtaggaatttcatttgcttttttgcaggttgaaatatggtcggcagcttcatatataggtgttattacatttattctttcaattattggagtcttagttggaaatcggtttggagttaagtttaaatcgaaagctgagtttgcaggaggaataattttggttttgataggtataaagatacttttagaaggtttaggaatattgagtttttaatttaaaatagatcggtggtaatgatgtgaaggaacaattgtatacaattccggtgaatgaagcgattgataaaaatgaagaatgtttattctgtactttaaataaaaaggtggaagaagatatattgaattatattttgggaccttcatatatggaagaagatattaggtctgaaaccgacaaaattggtttttgtaaaaagcattattcgcaaatgtataaagcgcagaatcgtttaggtgtagctttgattttaagtacgcatatgaaaaatatcagacaaaatttgaatgatatttttaaggatgaattaaatgaaaccaatcacactattaaaaaaaatctgtttagaaaaaatgaggaacaaacaaaatctgttgaatacatttctgaaatagaaaattcttgttacgcttgtaaaagaatggaatctcgaatgaatagttatattgatacatttttttatctgtggaagaaggaagatgattttagggaaaaaattttaaactctaaagggttttgtcttgaacattttaatatgattattaaagagggaaaaaagaaactaagttcagataaatataaagattttttgaccgtgttggttccgcttgaacttaaaaatttggatttgcttcaagaagatatagattggtttatacaaaagtttgattatcgctttaaagatgaaccatggaaaaattcaaaagatgcacttcaaagaacaatattaaaagtttcttcggagaatgttgaggaatagtccggattaaaatcgtgaggaaatacaatggatattatagatataattataaagcagaaaaatggtattgatctttcagattcagaaattgaatacttgattaacggttatacacaagggataatacctgattatcaaatgtctgcttatttaatggccttgtgttttaccggggcaaatgaaaaagtaatttcaaagatgactatgtgtatggctaattcgggagatatacttaatctttccggtatcagcggaacagtattggacaagcattcaacaggaggagtaggagacaaaacaaccttagtagtaggaccgtgcgtggcagcgtgcggcggcaaggtggcaaaaatgtctggacgtggtcttggatatacgggtggaacaatagataagctagagtcaatcaaaaattttaatacacaaataccagttgaacgttttatagatataattaatgaaattggtatttctatcgttggtcagttgaaaaatcttgcccctgccgataaaaaaatatattcattgcgtgatgttacaggaactgttgattgtattccgctaatagcgtctagtataatgagcaagaaaattgcatccggcgcaaatgctatagtattagatgtaaaatatggcagcggtgcgtttatgaaaacgtataaagaagcaaaagagcttgctgaaactatgataaaaataggaaatcagaatggtaaaaaggttaaagctttgcttacagatatgaatgagcctataggaaatacagttggaaattcacttgaagtgatagaagctatacagactctaaaagggaatggaccaaaagattttttagaactttgtatagatatttcaagtgcaatgcttcagcttgaatttgttgaaaaatcagtagatgagtgcagaaagatggcgctggacagtattgaaaatggaacggcactgaataaattcagagagttggtatttttgcaaaacggagatgtagaatgtattgatgatacaaataaatttccaaaatcaaaatattctttagaagtaaaagctaatatgtcaggtcaaataacaaagatggattctgaaaagattggtaaaactgcatgtttgttaggagcagggagacaaagcttgaatgataaaattaatcattcagcaggaatttttataaataaaaagactgatagttatatttcaaagagtgacgtattagctgttttatacacggataaaaaagaaattttagattttacaaaagaatattatttagacagcttaacgatagaatgattatattttgtgtaaattggagcggaggtaatattggtgagagttgtaaatgcgagtcagatgaaacagatagaaaaaaatgccaacgatatgggaataacatattatcaaatgatggaaaatgcgggaatgtgcgttgctgattttgtacgtaaaaatacaaaagattttgaaacgaaaataatattgattctaacaggaaccggaaataatggcggagacggctttgtcgctgcaagaataataaaaaagtttggtggaaacccactaattatgatggttgacggacctcctaaaactatagatgctatcaaaaactttaataaagctaaagattgcggaatagaaataataacttttgaaaaagataaaagtattcccataatttggggaagtgacgcaattattgatggcgtttatggaacaggatttcatggtgaattaaatgaaaatataaaatcattattttctgcaatttctgacagcgatgctataaaatttgcaatagatattccgagtggagtagatgattcgggtgaaatttcagacggcgcttttaaagccgattttacaatagcattagatagtttgaaaaatgctcatatgaaagaaaatacttttgaaaactgcggaagagtagtatgcgctgacattggaataccggaagaatgccataaaatataactttataaataattaattatatatttaaacgtaataaagtcagttttaattattaaaactctgttgcatataaattattttttataaataatactaaagaaaaataagattgaataaattataaaatttggcgattattctttaataaaataatttattcgtgtgataaaaacgctgcgctttaaaaaagcgtgacgttttttctatttataaatagaaattttgttttcaatatataatcagtaacatttgtatactaaaaaatgaataaaagtataataaaaatattttttaaatgatattaaacgttgtatgaaagagcaatatattatttgaacagcatataaatattataaaatatcaattcgtttgactataaatatatatagttttaattcttgtaattttttataagttacttttaaaatattttaaatagttttaatgtaatctataagttgttaggagtattttatagcattcttgacttttattgctttaattaatataatattataataaaataaattaaattgaaaaggaacttaaagatgaataaaagtttttatgaaaaaaccagtcctgaaaacgcaaacattaattccaaaagaattataaattttataaataggttagaaaaagaagaagtagatatgcacagcatattgataatgaggggaaataagctgatttgtgaagcctattataatccatttaattcaaatacccttcatagaatgttttctgtcaccaaaagtgtagtatcaatggctattggtgccctagccgaagacggggttatagatttagacgcttcaataactaaatattttccggaatatgaacctgaagatggattttatccttatcttattgaaacaacaattcgcgatatgctttctatgacaacgcctcataacggaacaacatttgataaacacagtaaaaataattggacggaatcatatttttcaaagaagcctactcataggccgggaactattttttcttatgatacatccgcctcacatgtaatggcagctttggtagaaaagttaacaggtttgtctttgcttgattatctgagaacaaaaggtttgtcaaaagttggtttttctaatgaatcttattgtatttcggatgggtgtggtgtaagtcaaggcggatcaggtatgatggcgtatcctaaggatttactgcttttagctaaacttgcaattgattatggaaagattgataatattcaaattttacctgaaaaatatttaagggaagcaacaagttataaggttgcgaattttgtaaagggaagttttttagctgaaatgcaaggatatggatatcaattttggatgaccaaaaataatgggttcatgatgtatggaatggcaggacagttggcattatgttttccggataaagatttaatacttgtcacaacagctgacacaaccgatagaaaaggcggcgtacaacaaataatagacgcattttttgatgaggtgtattcatatatagacgaggaaaacgagtttgataaagattcatatttaaaactttgtgagatatctgataattgcagtctcaaacctcttaaaaataatatttcagttgagcttgataagacatatgagttttttgatgataatagtttagaaatatcaaatgttagaattattaccagcgtcagcggcggaaaaattatattagataatacttatggcagtcagattataaaatttggatttaattcatttttggacgggaatttcagccattatgattgcccgtatattgcttcaggatgctggacagataaaaacactcttgttgttaaggctaatcttatcggagaatgtataggaaaagttataatgcagttttcatttaaaaaggatggagctgttacaatattttccagaaaaactgaagaaatattatttggtgaatattccggctttgctcaatcaaattagattaataattcatactgtgttatttttatatttgtatattcttaattgacatgaatattaatatgtaatataattacattatgatacttttaaaaaggagctaatcatgaaaaaaatattttgtaaagtatttttttgttttgtcattattgttataagttcagtatttttgatgagttgtggaaaaaatgccacaaatccggataaaataacagacaataatatttcagaaaataccggtaatattgaaaaatatgatagtgcaataaatgacgagagcaatactgttcttaaaaatgatgttgttgctttggtaaacggtgaagaacttaaagctaaagattttggatattatatttataacaatgctgttatacaaatgtataaagaggacagtaataccacggaggatgttacaacatttgattggtctaaaacaaataaagatgggaaagcattacgtgatgtagttgttgagaacgcaatagaggatgcgataaacgatgttgtgttcagacagtcggctgagaattccgggtttctcattttcggtgctgaaaaagaagccgacgagcttgtaaatggttcaattgaacgtcagggagaagaacaatttaaagtaagtgcgaatttagttggtgtgagcgatgctgaaacatataaaaaaatttatactaatatttctgtttttgaaggcgttgctgaagactttcagaataatcccgaaaaatatgttactgatatttccgtattatctaattatattggcaataaaggcgcctctgtacagcatgtgcttattttaaacgatacagatgacgcttctcaattggctgaggacgttctccaaaaagccaataacggtgaagactttgtggagcttatgaaacaatataatgatgataccagcgaaaaagaatccggatatacatttcctgagggagaaatggttccatcgtttgaaaccgctgctttttctttaaaaataggtgaaataagcgatatagttgaatctgattacggttttcatataataaagcgaattgttggtgcatatgagcttcaaaatttttggaggtcggaagcagatgttcaaatatctccgaattctctgcaaatggttaatttttacgatgtaatggatatgataaaagaagctaaagcaaaaaatgttggttagataggttagaaaaatttatataaggatggtatattattatggaaaacaaatcaaataaagtgttggttgaaatggaaagcggagattcttttgttattgaactataccctgagtttgcgccaaaaactgttgaaaattttaaaacacttgtatcaaaaaagttttataacggtttaacttttcatagggttatagatgggtttatggcacagggtggctgtccaatcggtaatggaacaggcggaagtgatgaaaacatagttggagagttcaagcagaatggttttgttgataacacattaagtcatacaagaggtgtagtttcaatggccaggtccatgagtcctaattcggccagcagtcaattctttatatgttatgatgatgcgtcttttttagacggtcagtacgctgcatttggaaaagtagttgaaggaatggaaacagttgataagttccttgaaacagaaagagtaggcgcggagggcggaactccggttactcctatagttattaaaagtatgagttttgccgaataatattatataaggtgattttgtgaaaataaatgtacctgaagaagtaaaaactataataaaacgtttgaattctcaaggtttttcggcgtatgttgtaggcggatgtgtaagagattcaatccttaacaaaaaaccacaggactgggatatttcaagctccgctaagcccgaacaagtaaaagaaattttttatgatatgggagttatagaaaccggaataaaacatggaacggtatctgtaattattaatcataatccgtatgaggttacaacatttagatgtgatggtgaatataaagataacagaagacctgatactgttacttttgtgtctgacattgatatagatttatccaggagagattttacaattaatgcgttggcttgcggctgtgaagatagcagtgaggttatagatctttttggtggaattgaagatataaaaaatggtatagttcgctgtgttggagaaccggaaaaaagattttctgaagatgctctgcgtatattgcgggctcttagatttgcttcggttttaggatttgatattgataacaaaacttcaatagctattcataagcaaagggacttgctcaaaaacatttccgttgaaagaataatgtctgaatttaaacagttagtttgtggtatcaatgcagtgattataataagagaatttagagatgtaatcgaaatttttatacccgaaattaccgctatgtttgaatttaatcagaatacgccgtatcattgctacgatgtttgggaacatactttgcactctgtcgaaatgatagaaccggaagttgatttaagatttacaatgctttttcatgatattggtaaaccaaaagtttattcagaagaaattttagaaaatggtaatactttgggtcatttttatgcacatgcaaaatattctgaggaaatagctgcaaagatattaaatcgtcttaaatcagataaccgtcttttgcatgatgtaagaaacttggtaagaatgcatggcgatcaaattccattatcaaaatcaggtataaaaagaaaacttaataaaataggcgtagagttatttagaaaattattgaaagtaaaacgcgccgatgttttggctcagtcgcctggattggctgatgaaagaataaaagctcttaaagatattgaaattttatttgatgaaataatatctgaagaagaatgttttaaaataaaagatttaaaaataaacggcaaagacctaattgaattaggtttttcaggttgtgaaatcggccaaactttaaaaattattttagatgcggtagtagatgggaaaatagataatgatagggataaaatccttgaatttataaaaatgatttaatccgttgttttataattttcatattttgacttgatttttatttatatattatatataatgtgtatcatgaaatttttataagatttatgtttagttgatagatacatttggttaggagttttatatatgaaaaaaaggtattcaattggtatagattatggttctatggcagggaagtccgtgttaattgatgttgatacaggtgacgagattgctgtgtcagtttttaactatccgcattcggttatgacggaatgtcttcctgatggcaaaacaaaactagaagatggctgggctctgcatgacccgcaggattatcttgacgtattggcctcaactataccagctttgcttaaagaaacggatattaatccggcagatattattggcataggtgttgattttgcttcatcgaccgtcatgccggttaaagaagacggaactcccatatgttttatggaagagtataaatctgaacctcatgcttatgttaaactttggaagcatcatgcggctcaaaaatatgctgatagtttaaataaatacgctgaaaaaacaaatgaggactttttattaaaatacggcggaaaattttcttcagaatggttagttccaaaaatttggcaaatagcagaagaagcaccgcgcgtttatgatgaaatggacaagtttataggggctgctgattggatagtttggcagctcacagggactgaaccgataaatactcaaggaatagaaaacacgctgccgtcaaaagagtttttaaaattacttaacccaaaacttgaggactttgttgataaaaaatttaaacgcaaagtttcttcaattggtaaaaaggctggtgaactaaaccaatttgcagctggacttacaggtttgaagcaaggaacagcggttgcattcggaaacattaatacgcaggtatcacttccggccgtggggatagctgatccgtgcaagcttcttatgataatcggaaagtctacttgtgatattgttttgggggaagaagaaaaaaatatttccggtatttactgcgccgatataaatagtattattgacggatattatggctatgaggcaatacaatccggcgttggcgaacattttgattggtttgtaaaatccagtgtccccgaaagttattatagggaagcgaatgctcttgatatgaatatccatcaactgctgcgcactaaagcaagcaaacaaagacccggcgaaagcggattgcttgctttggattggtggaatggcagccgaagcgtattgatggataaagatttgtccggtgtaatgctcggattaaacttacaaaccagacccgaagaaatttatagagcattgcttgaagctactgcttatggtgccagaatgattttagatactattagagatgctggaatacctgttacagagctttatgctgctggtggagttgctcagaaagacgcgtttataatgcagatatatgctgatgtaatgaatatggacataaagattgccggttctgttcatacacctgctttgggttcagcaatgtcaggcgctgtcgctgccggaaaagaaaacggcggatatgacaccattgaggaatgtgcgaaaatattaggaaaaacaaaagctcattattatcgtccaatacctgaaaatgttgagatttataatgagttatataaagaatataagaaacttcataattattacggtaaaggcggaaatgatgttatgaagcgtttaaaagatataaaaatggcattaaaaaattaaatgatttttaaaaagaggtaaattaatatgttagaagaactaaaacagaaagtctatgacgctaatatgatgcttccgaaatatggtttggttacattcacttggggtaatgtttctggaatagacagagagaaaagtttggtagttatcaaaccgtcaggtgttgattatgataagttaaagcctgagcatatggttgtggtagacttaaataccggcaggattattgacggaaatttaaaaccatcttctgatacagcaacccatcttgaattatataaagcttttaaaggaattggtggtgttgttcatactcattcgtcatatgctacttcgtgggcacaggcaggcagagcaatcagagcttacggaactactcatgcagattatttttatggagatattccttgtactagagctctgactaagatggaaatagagaacgactatgaattaaataccggaaaagttattattgaaacatttgagaataaggatccggaagctattccgggggttttagtatttaatcatgctccattttcgtgggggttagacccagctgaagcggttcataatgctgtagtgttggaggaagtcgccaaaatggcttttcgctgcgagataataaaccatgatattactagaatgggtaaatatattttagacaagcattatcataggaaacatggcaaaagtgcctattacggacaaaataattaaactttacggagaattttatgggtaaatttattgtgtttgaagggcttgacggctgcggcaagacttcacagattgatatactggcaagacggctaaaagaaaaaggtgaaaaagtctatgttacggctgagcctacaaattatgaaaccggattgtatttaagacgaattttgtcagaaagtttggaaaaagatatatatttgttggctgctttattcttagcggataggattgagcatataacgcatcccgaaaaaggtataaaaaagtatttagatgatggttacacagttatatgtgacagatattattattcatctctcgcttatcaggggaaaaatccaaattgtaattttgaatggatacttaatttgaaccttaactgtgaaagattgttaactcctgacatttgtttgtttcttgacgttaacccatcaacatgcaaagatagaattgatgtatccagggataatatagaactttatgagaaaagcgtggaagaaatgagtaacataagacgcggttttttggacgtattttctacgctgaaaaaagattatagtcaaaatattatgattattgatgctaatggaagcattgatgatgttgcaaaggagatattaaaatatgtatagaagattatttacttctgagtctgtaacagagggacaccctgataaaatatctgatttaatttcagacgcgattttagacgcaatccttttaaaggatcctaatgcccgtgtggcagttgaagttactgtaacaaccggactggtgcttgttgttggagagattacgactaaaacttatgttgatataaagagtattgttcgcgaaacaattcgcgaagttggatatgaccgagctaagtatgggtttgattgtgatacctgcgctgtgcttgtggctattgacgagcagtccggtgatattgcccggggagttgatgacgacggagacggaattggcgctggggatcagggaatgatgtttggttttgcatgcgatgaaaccgatgaatatatgccaatgcctatatacttatcacataaattgacaagacaacttacaatggtaagaaaaaagaatgttttagattacttgagaccggacggaaaagcgcaggttactgtggaatataatgaggatggctctgtaaaaagagttgacactattgttgtttccacccagcacaatgaaactgttacacaaaagcagcttcaggatgatatcaaggagtttgtaatagatcctataattggtgacgatctcaaggacgagaatactattatatatataaatcctaccggaagatttgttattggaggcccacagggcgacagcggacataccggaagaaaaataatagttgatacttatggcggatatgccagccacggaggaggagctttttcggggaaagatccgacaaaggtggatagaagcgccgcatatgcagctagatatgtagccaaaaatgtggttgcagcaggtcttgcaaaagcatgtgaggtacagttagcatatgcgattggcgttagcaagcctgtgtctattagagttgacagccgaggtaccggtgttatcagtgaccaagaaatagaagaaaagattttaaaagtttttgatttaactccgggcggtattataagagatttgaacttaaagcgtccgatttacaagcagactgctgcttatggacatttcggacggaatgatttggacttgccatgggagaagattgacaaagcggaagctttaaagaatgcataataatattacaaaggaagcgcattcatgttgcttccttattgtttatatattgataggagagtattatgtcttatgatgggtttgttacacatagtgttgttcatgaattaaacggtaaaattttaggcggtaaaattgataaaatataccagcctgaaagcgatgaaataataatttcggtcagaacatttgatgggaattaccgtttattattatcagccagcgcatcaaatgccagagtgcatttaacgacatcaaaacgcgaaaatccaatgaccccgcctatgctatgtatgctaatgagaaaacacttattaggcggcaaaattatcgggatagaacaggtagattttgatagaattattaaaattgatatagaatgttataatgaacttggcgatttaggagttaaatcaattatttctgaaataatgggcagacacagcaatataatttttattgatgaaaataataaaattttggatagtgcaaaacatgtggattttacagtgagtgcagttcgccaaatactgccgggatttgtttatcagcttcctccaaagcaggaaaagatgtcgcctaaggagttttctctgcttgattttactaatgattttactaaagaagataaggatattttactggataagtttctgttaggtaaaattatgggtttgagtccgcttattgcaagggaaatagtatatagattttcaaatcacacaaaaatcacaaaaagtgaaattgatgattataaatttgctgccacggtggatttatttcttaaagatattgtttcagataagtattcatcgtgtctagttttagaaaaagatacaggaaagccgatgtatttttcatgtgtagaattaactcagtataaaaatgttgctgaaattaatatattagattcaatatctgagataattgataaatattatttaacaagggcttctcaggaaagaatgaagcaaaaaagtgcaaatattttgaaattagtccacaacaatattgatagatgcactaaaaagcttgttatgcatcgtgaaaatttagaaaaagcgaaaaatagagataagtataaaatttgcggagatttattgacggcaaatatgtatagggtaaaatttggtatggatgaagtctgtgtggaaaattactatgataataattctgaattaaaaataaagcttgatccaaatatatctccttctcaaaatgctcagaaatattataaaaaatataataaagcgaaagtaacagaaaaatatgccgaagaacaaattgtaggtgctgaagaagaacttgagtatttagaaactgttcaggaaagtatattaaaggcagaaagccctagagacttatctgaaataaaagaagagttggcagaacaaggatatatctctaatactgcttcaaagaaaaagaagaaaactcaaaaatctatgcccatgaagtttatatcaagcgatggctatgagattttagtaggacggaataataagcaaaatgatgaagtcacaattcgtatgtcatattctactgatatttggcttcatacaaaaaatattccgggttcgcatactttaattagaacaaatggttcaggcgaagcaccggatagtacaatacttgaagccgctcagctagcggcatattatagtaaagctaaaaattcggctcaggttcctgtagattatacacaaataaagaatgtaaaaaaaccaaacggtgctaaaccgggctttgtaatttatgaaaaaaataatactatttatgtaactccaaaattatttgaaaaagttacagaataaatgtttaagtaaaatattgtttttttagataaaatataagtttttatgatagttaataagtaaacttgttattttagtaattatgaacgtatttttttagattgagtatagtttaaaaatgtattttaactagatttttaactatatatttttatttggattaatgatctaattcagcttcccatttgggaagctgataatgtatttgccgaaatttttaataattaactatttttttcttcatagtatttctttatttcaccagctaaaaataatgaacctataatacataataactcatctttatgaagtgttttcacaacttcattaaatgcagaaattggatttgaattaatatctgagacgatgttatttttcataaaaatattctttatagtacctgaatccaaacatcgcggcatatttatttctgttgcagttatttttgatttttctgagatagcataatcagaaatcaaattaataattgattcataatctttatcagacataaaagcaactaaaaaatgaatttttttattcagattttttaaagattttaagaaagaatttatagcctgcggattatgtgcgccgtcgacgataatattcggtgcaataaactcaaatcttccttctatgtttgcatgttttaagctatttgttatacaaccagaagaaatagcatatccttgatttaataaactattgataatttcaatagctgtaactgcattataagtttgaaatcttccatttaatgttaaatcatagcgcgttcctttatattcaaaagaatttttataagtttccggaagcgttggtaactccgggatgattaaattagagtttttttcttgacatattaatctaatattatcaaatacttttgattcttgaataggatataaaaccacatctgaatttttcttaattatcccggctttttcttttgaaatttcatctatggtattgccgagatattgacaatggtctaatccaattgcagtaaaccctactaccaaaggatttttaataatatttgtagcgtctaatttacctccaaggccaacttcaagaataacaaaatcacagttttgtctattaaaatattcaaacgcaacagcagtgtcaaaagcgaactctgatacaaatgcgtcatatttttctgtcatattttttacatatgacgcgatatcagctaaatcagaattgcttataggtataccattaattttaattcgctcattaaagaattttaaaaatggcgatgtaaataatcccgttttataacctgcttctgtcagtatttgtgaaaccattgtacaggttgagcctttgccgtttgttcctccaatatgtataaattttaaattatcctgagggtttcccattttgtttaaaagtttttctagcagagcattacccaaaacacggttaaatttaggaatactatgtatatattctaatgtttctttatagttcatattattctgtcctcctgacagaaacaccctcgttttcaagataattttttaaatcacaaatttctatttctctaaaatgaaaaagtgaagcggcaagtgcagcgtcagctttgccatcagttaatgcatctttgaaatgtgacatgtttccggcgccgccggaggctattacaggaattgaaacattttcagatatagtttttgttaattctatatcataaccatttttggttccatcacaatccatagaagttaatagaatttctccggcacctaaactctcagccttttttgcccactctaaagcgtcaagcccggtgtctatacgaccgccgtttatataaacattccagcttccgtattcatttctttttgcatcaattgcaactacaacgcattgacttccaaatttttgggctgcctctgatatgagttgaggatttcgtatagcagatgaatttattgaaattttatccgcaccttgcagcagaagttctctgaaatcatcaacagatttaattccccctcctacggtaaatggtatgaaaacagtctcggcaacttttttcgccatttctataactgttcctctggcttcatgcgtagcggttatatcaagaaaaacaagttcatctgcgccggcttcgttatatatctttgccacttcaacaggatcgccggcatcaattaaattaacaaagttaactccttttacaactctgccgttttttacgtcaagacatggtatgattcgctttgcaaacattttatttctcctttttataaattgccaaagttctttaaaactttcaatccttcatttccgcttttttcaggatgaaactgtgttgcaaaaatattgtttttatgcacagcaatcggaagttcagttccatattcagttacggcggatataatttccttatcctttggattaatataatatgaatgaacaaaatacatatatggttcttcacttaatccttgaaaaataggacagtttttgtcgtactttattgaattccagcctatatgaggaattttaaggctgccttgttttggaatcttgatacaatttccatcaaatattttgagaccgggttcattaggtgattcctcacttgtttcaaataaaagctggagcccaaggcatattcccaaaaaaggtacgttattttctataacttgatgtatacactgagttagataagctttattaatagaattcatacagtcgccgaaagcaccgacgccgggaagaattaccttatctgcagaaattatttcatccggttttgaggttattttagctttaaatcccaaaaattccaaagctttttctacagaccgaagattgccggctccataatcaataatcgctatcatcgtgatctccttaaagttttgtcaatataatatgaattcaattatactattttataataattatttcaagagtaattgagaaaaatattgctgtaattttacataattcgttgacttaaacagtaaaatattacttgccatatcatttggtttgtagtataatgacaaaaggtataatttactataatgacgtttattactgaaatcaggtgacagaaaatgaaagtattatttatgggaacaccggattttgcggtgccttgtcttgaatcaatcattaaaagtgaaaataataatgttattggagttgtaacacagcctgataaaccaaaaggaagaggtcataagcttcagcctacacctgttaaagccaaagcagttgaatataatatacctgtgtttcagccggaaactttaaaaaatagaagttttgaagatgaattaaaacagctgaatcctgatattattgttgtagtagcatatggtcagatattacctgaatatattttaaactttcctaagttcggctgtataaacgtccatgcgtcattgcttcctaaataccgcggtgcagcgccgatacaatggagcataataaacggagacacaacaaccggagttactacaatgtatatggctaaatcccttgatacaggagacatgatacgaaaagctgaaattcaaataggcgatgaagaatctgccggagaacttcacgatagattatctcttataggagcagatttgattgttgagacaataaaaaaactttctgaaggcaaagcgatcagagtacctcaaaacgattcactatcgtgttacgctcctatgcttaataaagaaaccggtcatattgattggaataaaaattcttctgatataatcaatttaatccgcggaacaaacccatggccaggagcttttacaagttataaatctgaaataatgaaaatatataaagcatataaaggcaatactaatacagtcggcaaacccggagaaataataggaataaaaaataaaaaaatagaggtttgctgcggtaactcaagttcaatattaattgatgaaatacagtttaagggcggaaaacgtatgaatgtttcaagttacttaaacggtcatagtatagatatcggtgaaattttaaattaggaggtaattaaatgtattttggtttatttgaccctacaatgtatttgctgattcctgcaattatattagctttatgggctcaaacaaaggtttcaagtacctttaacaaatattcaaagatagcaaatgcacgcggtttgacaggttcagacgcggcgagaatgatattagacaaaaatggtttgtactcggttaaaattcagcatataagcggaagtttaactgataattttgacccaagaaccaatgttgtaaatttatctgacgcaacttatatgagtaacagtataggtgcaataggtgttgcggcacatgaatgcggtcacgccgttcaatatgcaaccggatatactccgataagaattagaaatggaatttttccggttgtaagcatatgcagtaagctttctatgccaattattctattaggatttatacttacagctttcggcggtatggctcctttgattgtggatattggtataatattgtattcagctaccgttgtttttcagcttattactcttccggttgagtttaatgccagcagccgtgctttaaaaactttggaatcatatcaaatgttgggttctgaagagataaaaggtgctaaaaaagttttatcggctgccgctatgacttatgttgccgcagctttttctgcgcttatgacattgctgaggcttgttttgttatcatctaacaacaatagaagagattaggagtattcatgaattcaagagatatttcattgtcgatattaaataaatatgattatgacaaggcttatgttaataaattattagcagatacttttaaaaataaaaatatagacaataaagataaaggtttaattaatgagctggtattgggaagtatagaaaatcggtatttgcttgattttataatttcccaattttctaaaattaaaattaaaaaaatgtctgtatcagtaagaaatattcttgaaatgggaacttatcaattattatttcttgataaaattcctgattcagctgtgtgtaatgaaagtgttaagcttgcaaaaaaatatgcaaatcgttcgtccggttttataaatgcagtgttgagaaatataagccgcaataaatataatataaaatatcctgataagacagaagataaaatagggtatctttctatatactactcatttccaaaatggatagttgaaaaattagttgaccaatttggatttaaattttgcgaagatattttaaaatcttcgtctaaaacatattctccggctatacgcgccaatatattgaaagtgcctaatgatggaaatggtaaagttaaaactgacgagtttattgatactttaaaatctgagaatattaatataattcctaatgaagatatacaaaattgtttttgggtagatggaaaacttgatataaataattctaaaagctataaaaatggtttatatacaattcagaatcctagttcacaattaacggctataacgttagacccaaaaccgaatgagatagttatagacgtatgtgcggcacccggtggaaagaccacccacatagctgagcttatgaaaaataaggggcgcgttttggcttttgatatttatcagcataaaattgatttaataaataagtcggcaaatcgtcttggaatagatataatagaagcagttaaacatgattcttctatatttaagcccgaacttgttgaatatgctgatagagttttagttgacgctccttgttcggggtttggcgtgatacatactaaaccggatattaagtggcatagaaatgagaatgatattaaagaattaataaaaatacaggaaaaaattctttccgtttcgtcaaaatatgttaaaaaaggcggtacattggtatacagtacttgtacaattttgaaagatgaaaatgaaattcagatttcaaagtttctttcagaaaatagagactataaattgatttcagagaaaagattgtttactcatattgacggaggaagcggtttttatattgctaaattaaagaggatttagaggcttaatattcatggataaaataaatttaaaagatttgacattagaagaacttcaagattatataattaatcttggagaaccgaaattcagagcattgcaaatatataaatggatatacagcggtgtgtggaattttgaagaaatgactaatatttctaaaacgttaagagataagctgaaatctaatactactatcggaaatcttgcaatttataaaaagttcatatcaactcttgacggaaccaggagatatttgatacaattatcggataataattatattgaatctgtacttatgaaatataaacatggttattcaatttgtatctcatctcaggttggatgtgcaatgggatgtaagttttgtgcttcaactaaaaatggtaaaatacgcaatctctcagccggtgagataattgatcagattatcactgttgaaagggatgtcggtgaacgcatttcaaacgttgtcatgatgggtgttggcgaaccgttggacaactttgataatatagtaaaatttataaaaaatgtaaataatccaaacggtttgaatattgggcaaagacatataaccatatcaacttgcggtattgttgaaagaatttatgaattggcagatttaaattttcaaattactttagctatttcactgcatgcaacaaatgatgaaaccaggaatgatattatgcctgtaaataaaaaatataatatttcaaaattgcttgaagcatgtaaatattacgtgaataaaacaggcaggagaatcacatttgagtatactcttattaataaaaagaatgattatactcagaatgcagaagaactcttaaatttattaaaaggtattttatgccacgttaatttaattccggttaattcagtagatgggactggatttgtaccaggcagtgaaaaaaatataagagaattccaaaatattctcgaaaagaatggtataccggcaacagttcggcgtgaaatgggaagtgacatctcagctgcgtgcggtcagttgcgttcacagatataaataataaggaaggagcgttgacaatgaaatttgatgtttatggcgttactgacactggatgtgttcgtcagctcaatgaagataatttttgtatttgtggatttgagaacaataatgaacctggatattgtgtcgttgctgatggaatgggcggtcataatgccggagaggtagcaagccagctggctattgactttattactgaatccctcaatgatatacttcaaaacagtgaaaatcctgatgtgccaagaagaattaatgatgccttaaattctgcaaacgagagtatttataaaatggcaagagaagacaaaaatcggaacggtatgggaacaaccacggttatatgtacatttgctaatggtgagggatatatagccaatgtaggtgacagccgtgcttatgcttgcagaaatgatgaaatttatcaaatcactattgaccattctattgttgaagagatggttgctaatggttcaattacccgtgaggaagctagagtgcatccacagaaaaacattataactcgggctataggaagtgagaaaaccactaaagccgatatttttgaatatgaatataaacctggggatagtattattatatgcagtgatggactctcaggaatggttgaggacgctactattttgaagacggttcaggatggtaaaagttcaaaagagattgccgataatttgtgtgagttggcaaagaaaaatggcggggttgataatataactgttatagccattagaattatggaggaggagagttccatatgaatatgattggtaaagaaatagatggaagatatgaaattcttgaggaaatcggcaagggtggaatggcacatgtttataaatcacgggataagtcactaaatagacttgttgcagtaaaggttcttaaagaggattataaagatgataaggaatttgtacgtcggtttaatgtagaggctcaagcggcggccagtctgtcaaatccacatattgtttctatatacgatgttggatgcgaaaatggaatgcattatattgttatggaatatattgaaggagaaactttaaaagagtatatagaccgagttggagttcttccctggcgtgaagctgcaaattattctattcagatttgtgaaggtatagaggaggctcataataactcagttatacacagagatataaagccgcaaaatataataatggcttctgatggtgtgctaaaagtaacagacttcggtattgcaagagcatctactcaggcgacaatgaccatggcgaacaataatacaattggaaccgcacattatttgtctccggagcaagctagaggcggatatacagatgagcggacggacatttattctatgggtgttgttatgtatgaaatgcttacaggacaacttccgtttgatgataacagtcctgtggctattgctataaagcaccttcaggaaacggctacacctataacagatataaatcctgacgttcctaatgcactggaacaaattgttatgaaagccatgtcaaaagaacaagacagcaggtattcttctataacagatatgatttcagatattaaaaaagttttggctaatccaaatgtaaatctttttgcggcaggcagacgaagtttacctgttgataatcaggtaaacgatgcagcttcaaatacaataaaaatgcctagaacgtttgtggattctaatcttgatgaacaaatgataccgggatatgatttagatgattatgatgagcaggatgaagaatacgaagctatggaacgtttaaatgaaaaaagagccaaaagattgaaaaaaaagaaagaacgtaaaattgcttttattgcctttttgtctgcacttgccgttttagcagttggatttgcggctgcttttgcatttaccggtggttttggtatttttggcgtagagaaagattctattcaaatacctaatgtagttggtatgactattaaagacgctcaatctcagtatggcaaaagctttagtatcattgaacaaaacagaactgaaagtacaaaaccggcaggaacaatattagaacaaactccggctggaggagatacagtttccaaaagagacaacatcattatcagagtagtagttagcctaggaagcagttctgttactcttgatgattatactggaatcaaatatgataaggcaaaagaagaattagaaaagttaggtttaaagtgcagtaaaatagaaaaagttgaccctgaaatagaggcaggactaattattagtcaggaacctaagtccggcagttcggttgcagcaggagatatgattacatttactgttagcaagggaccggaaagtacaccggaaccttctcttgtgccaaataaaaattctaataatgactcgaataatcactcaaataatgagaacagttcgtcgtcaaataataaaccgaattcgaatgattcgtcaagtaactcgtcaaataatgacaaaaatgatgagaattcttctaataatagtggaagcaattcaagttcaggcggttcaggtaacactacaaatgagggctctagctcaggcagcagtaccggttcaggaaccagcacaggctcaggcagcggaagcggaacaggttcagaaaccggatcaggaagcgagtcgggttctgagggcggcacaggttcaggcggaggaagcggatccggatctgaaagtggttcaggaaacggttcagagactggctctggtggttccggcagtgaaagcggaacgggtagcggaacaggttctgaaggcggaagcggcaatagtttagaggattaatatatgccggaaaaaaatcaatttgaaatacagggtaaaatttttaaaggtatcggtggtttttattacgttaaagccggtaattttatttatgaatgcagagctagagggcgttttagaaaagatggaataactccattggttggtgatgaagttaattgtgtgatcgatatggcttcaaatacaggtatgattagtaatataataccgagaacaaattttttaatacgtcctcctgttgccaatgtaacacagatagctatagtcgtttcagtcactaatccgaaacctaatttaaaaactgttgataaacttatatcatcagctatatatgctaatataaagccattaatatgtattaataaaaccgatttacaaaatggcgaaaacctttttgaaatatattcgaaaataggatttaaaactctttatataagcgctgaaagtaaagaaaatatagatatgcttattgaaaagctctcaggagaagtcacggtatttgccggaaattcgggtgttggaaaatcaagtttactcaactgcatattaaaagacgctaatcttgagaccggaacggtgagcagcaaaatagaacgcggacgtcatactaccagacacagtgaattaataccgcttgataacaacggaggatatattatagacacacccgggtttagttcattctctgtaagcggttttgatgaacatgagctttataagctttttcctgaatttatagagtattccgataattgcagatttgccgactgcagtcataccgttgaacagggctgcgctgtacttgaagcggtagaaaccggtgaaatcagtaaatccagacatgaaagttatgtcgaacaatataaggaaattctagataataaaactttttgataacgggggataaataaaatgtccaaaataattatttcaccttcaatattatctgctgaccctgccaatttagaacgtgatgttaggctggtagaagaggctggagctgagtatctccatattgatattatggacggacattttgttccaaatttaagttattcggcaaatgtaataagagctttaagaaagaaatcaaacttaatatttgacgttcatttaatgcttcaagatgctgacaaattcattgatgaatttgcagaagccggttctgatataattacagttcatcaggaggcagttccaaacttaaaagaaacacttaaaaatattcactcatttggaaaaaaggcaggagtaagtttaaaacccggaactcctgtagatatgattttaaatgttttggatttgactgatgtggttctgcttatgactgttgagcccggatttggagggcaaagttatcttcatcaagtagataaaaaaatctctgaattatataagattatcaataatcaaaatctaaatatcgggatagaggttgatggagggataactgaggaaaatgtgaacagacctgtaagagcaggtgcaaacattattgtttcaggctcagcaatttttaattctaacaacataaaagatacgataaataaaatgcgtaagaaagcggaacaaggagtacaagaacgtgaaatcaataatttttagcggcgcttatatagaaaactatgattatttgtctgaaattaattttgataactatctaataatatgtgcggattccggatataaacacgcagagaatttaaaaatagtaccggatgttattttgggcgacaatgattcatatttaaaaaagtatcctgataatattaaaaaccttgtttttccaccagaaaaagattttacagacacccacgcagcgatagattatgctattaataataatgcagaagaaattttaattattggcggtcttggcggcaggatagaccatgaattttctcatttttgtcttatgaattatgctttggataaaggagtaaaactaaagttgattaacgacacaaatgagatatggatggaaaataaaccttttaaacttaaaaaatctaaaagaaaatatgtttcattctttccttatgcaggagctgtattgaatttttcaataaaaggtttaaaatatgagacaacaaatatgcgtttggttccaaaccgagttcaagcgtcgagcaatgagttttgtgattctgatactgcaattgtaacctttgacagcggacttgttatcgttatgttatgtgacgacagatattaattttaagtggagattttgcaatgaaatatatattaaagaacttgttgtattttgtattaattaccattgtagctgtatacagttcatcatgctctttaagtgataaatcggagagtataagtccttctccagccccaagtattggagtgagtaataatacggctttcagcgatatattttctgagtttaacgaattaaaaaatgtatcagcaggcctgttaaatagtaaaactgatttagtttggtggcagaaatttgattcgatatataataatgtgaatgcagtatatgaagaaaataatgctattaatatgagcggaaaactcggcggtatggataagtctttatcacaagcgttggtaagtgtttcttcatcatataaagacgcatttgatattatgaacgcagcaaaagacaatgatgattcggaaatacagcaatatgcttataatgatttttcaaataaaatatcttctgcaaataatcaatgggaacatgttttagaaacattgattgaaacatctccgcctgatagtagtcaataaaacaattatttatatattgttaatttaaaataaaattatattttagctatttgtcgttaaaccatctatatagtttgtcgtatatagagtatatattataaaataagttataatattaatataagaccccagcgtgtaagaaactacgcatggggtcttatattaatgagattatattcaactatgcctttactatctttaaaaatttctttttacctttttttactatcatttcgttttcattttcgaaataagtattatcaataattgtcgaaacgtcagaaattttctcgttattcactgtcagtccattttgctgtataagtcttctgccttcagcttttgatggtatgagtccaacctgaaccaataaatcaagtacatttattcctgcattgataattgaagcatcaacagtttccgatggcatatcagctgcatttccacctgaaaatatagccatagccgcatcatttgctttttttgcttcttcttcaccatgcaccatttttgtaacttcatatgctaataagcatttcgctttgtttagttcagcaccttcacatttttcatattcagcaatttcttcaagcggtagaaatgtaaccaattttagaagtcttattacatcggcatcatcaacatttctccaatattggtaaaactcataaggtgaaactttctcagggtcaagccaaagagctcctttttctgttttacccatctttttgccctcgcttgttgtaagcagagtaaatgtcataccataagcctgtttgccgtctttacgcctgattaattcaatacctccgagaatattagaccattggtcgtctcccccaaactccataataacgccgtaatctttatgaagcttataaaaatcatagctttgcatcagcatatagttgaattctaagaatgaaagccctttttctaatcttgttttaaaacattcaaatgtcagcattctgttaacagaaaagtgaacgcctacgtcgcgtagaaagtcaatataattcagtttcagcagccaatcagcattgttgaccattatagcattctcaccgtcaaaattaatgaatttagacatctgttttttaaagttgtctgcattatgctgaataacttcctgagttatcatagggcgcatatcagcttttcctgttggatcgccgaccatggtagtacctccgcccaataaaacaataggtctgtgtcctgcgttctgcatatgtttcattactataagctgcataaaatgacctatatgaagactgtcagcagttggatcaaagccaatataaaatgttattttctcttttccgagaagctctctgatttcatcttcatgagtagtttgggcaattaagcctctttctttcagggtgtcaaaaacatttttattattcattgtccgaattctccttttctccatcatctactggtacagttatttcaatacccagttcttccaattgttttttatcaacataactaggcgatttcagcattaattctgatgcggtttgaacttttgggaaagcaattacgtcacgtattgaatcgcatcctgccataatcataacaagtctgtcaagaccataggctagtccgccatgcggtggagtaccatatttaaatgcctccattaaatgaccaaaacgctcccaagcttcatcatgcgtgaaaccaagtgctttgaacattctttcttgtaaatcagaattaaatattcttaagcttccgccgccgatttcgcttccgtttaaaataatatcatatgcttttgctctaacgttttgaggttcagtttctagtttttcgatatcctcatctaccggatgtgtaaatgggtggtgtttagcaacgtatctgtcttcctcctcagaatactcaaagagagggaagtcagtaacccaaagaaaattaaatttagaattatcaataaggtcaaattgacgtgccacttcaagacgcagattaccaagagcatcatagaccacatcgtttttatcagcaattataagtattgcgtcgccgggaacagcgtcagttttagaaagtattgaattaatctcgtcatctgataaaaacttggttatttgtgaacgcaaagaatcatcttcaacaacaatccaagacatccctttagccttatatgtcttaacatattcagagagtgcatcaagcttcttcctggataacttgttcccaagaccttttgcatttatacagcgaacgcttccgccattttcaacggcgccggagaacactttaaaaccgcagttttttacttcatcagaaatatctataaactccaaaccaaatcttgtatctggtttatctgaaccaaatctattcattgcctcattatatggcattcttataaaaggagtttctatgtcaattcccatagcttctttaaaaactttttttaaaaagccttcatttatgtttattatcgtgtcaatatctacaaatgatagttccatgtcaagctgtgtaaattcgggttgacggtctgctcttaaatcctcatctctaaaacatctgacaacttgaaaatacctgtcatatccggcaagcataagcatttgtttatattgctgcggagactgcggcaaagcgtaaaattttccttgctgaaccctgctggggaccaaataatctcgagcgccttcaggagtacttttggtgagcataggagtttcaatctctaaaaaaccgtttgcatcaaaataatcacgagcaattttagtaactttgtgacgcagcatcatatttttttgcatatcaggacgccttaaatcaaggtatctatattttaatcttagtgcgtcattagtgtcaatgttttcctcgatatagaaaggaggtgtttcggatgagttaagaacccttagctcagtaacaaaaacttcaatttcaccggtaggcatatttttattgacattttcaggcgttctcttgagaaccttacctttaacagcaataacatattctccttttaaatgctcggatttttcaaatacatctttgtcagttgaatcgttaaaagctaattgtactatgccggttctgtcacgcagcgtaacaaaatttacgcctccaagttttctgttttttgctacccaccccataagtacgacttctttgttttcatctgaggcattaagctcaccgcacatatttgtgcgtttcatatcagacaatgtttcaaattccatttatctttctccttaaaataaattataaacaagataatatcatttttttattatattataaatcgaatcacaggataattctacaacagtttcttcgcctgttcccatgtttttcaatgaagccttattgtttaaaacttcatcatctccgataacaatactataacatgctcctagtttatttgcatatttcatttgtgctttaacgctcctgtcacataaatcgcgttcagcccaaagacctttatttcttaaatcatatactaacttttgtgcggttaagctggcattatcgccaattgaagctacaaatatattgggacccaaactttctccaagttcgattccttggctttttaaaattaaaatcagtcgctcaatacccatagcaaatcctataccaggagttggcttgccgcctaattcttcaacaagtccattatatctgccgccgccgcatactgtagactgggctccaagagcatcagatgatatttcaaacactgttcttgtgtaataatcaagccctctgacaatatttggatcaatagtatattttatattaagtttatctaaatatgatgtcagctgattaaaatgagaatcacaatcctcacataaataatcaatcatacgcggagcatcagcacaaacttcctggcataccggtgatttgcagtcgataatccgcattggatttttctcaagtctatctttacaagtatcacataatttatcaatatggctgctgaaatatttttttagttcttcattatactttggcttgcatttttcacacccaatactgtttaaattaagtgataagtcttttacaccaagagttttaaaaaagtcaaaagcaagagttattatttcagcgtctgtggcgcttgaatcgcttccaaaacattcaagaccgaactggtgaaactcccggagtctgccggattgaggcttctcatatctatagcaagaaattaaataatacaactttgtgggttgaggattcgcataaagcgaattttcaatgtaacttctaaccaatgaagcggttccctctggacgcaaagtaatgctacgcccgcccttatcgttgaatgtatacatttctttttgaaccacgtctgtcgtgtccccaactcctcggctaaaaagagaagtatcctcgaaaacaggagtacgaatttctttatagccgtatttagcacaaatttcatgagccgtattttcaatcagtctccaaatttttgaatcgtttggcagtatatcttcggtgcctcttggcttttttatcatttttgcctctcctttacaaaatttgttaatgtcccaataccatcaatttcaacctccactgtatctcctatattcatagaaccaataccggagggagtacccgttgtaatgatgtctccgggataaagagtcatgatttgcgatattgcagaaactaaataatcagttttaaatataaaatttgatgtattggattcctgcattacttttccgttaaggcgcaaacgaatatcagcgttatcagggtctaattgtgtctctataaatggtcctattggagcaaatgtgtcaaatcctttagctcttgtccactgtgaatcaagcctttgcaaatcacgagcggtaatatcatttaaacaagtatagccgagaatatattttttagcttcagattcgcttacgtatgatgcggtttctccaataactattgctaactcagcctcataatcaacttgttctgacatatcaggatatataatattatccatattaccaataacagaagaggatggctttaaaaacagagcaggaaatttaggaatattcagccccatttcatttgcatgattcgcataatttaatcctaccgcaactatttttgaaggttcgcacggcggaagaattttaactccatttctattaacatttgtacttgtatatgaaaagaaatcaaaaatatctccttcaattaattcaaacatatctgaagaattatcatactttgcgtaataaatctcatcatcatataatattctggcaaatttcattatttcatctccgtttatttttctgatatagaataatttgaaaggatttcatcaaataaatctatcaaatcatttcgtccggtacgcttttcggcagaaaatggaattaatattgaattattatccatttgtaaatcattataaatctcggttaaatttttgtcaatttgtgatttctttaatttatcaatttttgttgcaacaacaattgtattaaaattataatgtcttatccaatccgccattgtaatatcatcttttgacggtgcatgtctagcgtcgactaactgaataacttgaactaaattatatctttttgatagataagtatcaatcatagctgaccatttttcttgctcagtttttgaaacttttgcatatccatagccgggtaaatccacaatcctgtatctgtctttttgaatttgatagaaatttattgtggcggtttttcccggggtactgcttgttcttgcaagtttatttctatttgtcaggcaatttattaaagaggattttccaacattcgaacgaccaacaagagctatttcaggaactaatgtatcaggatattgttcaaatgaaactgcggttttaagtaaatctgcttcaacaaaatccattcgtatcacctcatcaaatttatatattacagttttgcaatcgttacattgcttatatcattttttatatatagttcattgtcaaggggcaataagttattcccgcttttttttacaggcaatgacggtttgaatggtttagttaatgcgttttccaaaacgtcatccatatttttagcaaagataaactcaatattatttttaactatatcaggaagttcttcataatctgctttgttttcaaacggtataataactttttttatacctattcttaaagctgccaatgttttttcttttaagcctccgattggaagaacttttcctcttagtgttatctctcctgtcattgcaacgtcatgttttacaggtttgccggttaaagcagaaatcatagctattgccatggtaattccggcagacggcccatcctttggtattgctccttcaggaatatgaatgtgcaaatcataatttttataaaaatcagacttaattccaaatttataactgtttgaacgtataaagctatatccggccttagcagattctttcattacatcgccaagattaccggtaagctcaagttttcctgtaccgtccataatattaacctcgacggataatgtttctcctccaacttccgtccatgctaacccattaactattcctacagaatctttcttttcaattgagttgtcgttatagattcttttgcccaaaaattcatttaagtttttccttgtaacgcttatataaaaatcattatcttccgcaactttaacggcaacttttctgcaaaccttagaaattgctctttctaaatttctaacgccggattcacgtgtatacccgttaattatttctttaataccactgtcggtaatatttaaattatggctagtaagtccattatttttacgttgtttttgaattaaatatttttttgcgatattgagtttttcatcttctgtatatccagaaacttcaattatgtccattctgtccaaaagaggacgaggaatattttcaagactgttcgcagaagctataaacataacatttgataaatcgaaaggaagctcaatataattatctctaaagcttttattttgttctgggtctaaaacctcaagcatagctgaagttgggtcaccgctgatatctttcgtcattttatctatttcatccaatagtataacagggttatttacattggcgcgctttatagcatcaattattcttccgggcattgcaccgacatatgtttttctatgacctcgaatttcagactcattatgtacgccgcctaaacttagcctaatatatttcctgcctatggattttgccaaagagctgactattgaagtttttccggttccgggaggaccaactaagcataaaatatttccgtttaccttatttgtaagtttgcttactgcaatgtactctaaaactctttctttaaccttatccaaaccataatggtctctgtccagctgtgtttttgctgcttttatgtcaagagtttcatcgccggttatatcccatggcagagctagtatggtttctatatatccttgaataacagcatattcctgtgaatgcgggggagttttagtaagccttgagaattcatcattcagcttgtccataacttcttttggtaaatttctgtctttgatgctctcgcgatatttttttatatcagagtcgttttcttcgccttcgcctaattcttcctgaattactttaagtttttctctgagtacataatcacgctgattattatcaagattttcctgaacctgatccattacacttttctctatatcaagtagatcaatttcttcagacattattgttataagctgttccattctttcaagaacgttcactttatccagaaccgtttgtttaagagcaggttttataggaatatttgatataatgacatcagtcatttcaccaggatcgtcaattgcgagcagagcgcttatggcctcaggagatgccttatcatacagttcaagatagtcctctgtcaaacgctgaatttttcgaattaagatttgagtatatgtatcatcatcagaattaatatcgtcaagtttagtaacattaacttgtatatactttcctatatcttcaaaatcatttatgcttgctcttgatttgccctcaacaagtattcttatagaaccatcaggaagacgaagaatttgacgtatttcgcatatagttccaatttcagctaagtctgatttaaccggagactcaactaaaaaatcattttgataacacaaaaatatcaatttatttttctgcattgccgcttctacagcgtcaatcgaccttggtctgccgacatcaaaatgaagtgccatgcccggaaagacaataagtcctctaagcggaacgaggggcagtgtatatttattatctatcatattattataccttaactttctatatgaatttaatgccgtgtaaaaatactcggcagaaattaattatactattaatatatataaatatcaagtatttccgcaaaattctactgtataaattcttataaaaacataataagtttttgtgcaacgaataaacaaataaacgaaaatttacagattatagtataatagtcaaatttgcgttttaaatcaatataaattacttttatttgcatatcaattgaaatataaaatatattgtgatataataaataaaatattgggggaagtgatattatgagtttactcatatataaagcgttgtgttatttttttatatatggatttttaggctggtgctgtgaagtcatatatgctgcaataattgacggaaagttcgttaatcgtggatttctaaacggacccatatgtcctatatatgggtttggggttttatttgttttaactttattggaaccgattagagaaaattttttatttttatttatagggtcagttatattaacatcagtgcttgaatttataacaggatttttgcttgaaaaagtatttaaaatgaaatggtgggattactcaaacgaacgttttaatattcacggttacatatgtttaaagttttcaattatttggggattggcatgcttaatagtagtcgatataatacatccattttttatgaaggctgtggaaataaatcctataaatattggtattatcacaattggtatattaagtgttttatttatatctgacattatttcaacaattattggaattaacagaacaaacagatatttaaaattattgtcaaaatcaggcagtcagcttagaaagatttctgaatctataggtgaaaatatttctgacaaaacaattcaatttactcaaaaaagtgaaaatataaaaaatgatgtaaaagaaaaacgtcaaaaagccataaatgatatggaaaaacatagagtaactattcagagaaaacaggaggatatattaaagaatatgcctatgacagcaaaacgtatacgttcagcatttcctgacttaaaattatttgagtattgggataataaaaataaagaaaataaaaaataatttataatataaaataaaatttggaggaagtaacagaagtatgattaaaagattagtttctgtagtatccatcattttaatttccgcattgttattttgctcatgcaatcagattgcatcagttaaaaacgatgataaaataagtgtagtcgccacaatttttccggcctatgattttgttcgtgaggtctctcgcggtacagacgacatagatttaaaacttttgcttaagcccggttcggaagcgcattcatatgaaccaaccccgcaggatataattgctatacaaaattgtgatgtctttatttatgttggcggagaatccgatgaatgggtaaaaaatattttgtcatcgattgacactaatttaataaatatagtttctatgatggattgtgttgagcttgttaaggaagaaacagttgagggaatggaagaagagaagagtgcaaaagagacatatgagccggaatatgatgaacatgtttggacatctcctagaaacgcgataaaaattgttgataaaatcaattcttcaatggcagaatcaaggcctgttaataaagaaatttataataacaacactataagttataaagagaatttaaagcagttggatgaaaattttcgtgaaattgtaaaatcgggaaaacgcaatacaatcgtctttggtgacagatttccattcagatattttgctgatgaatatggattagaatattatgcagcttttccggggtgttcggaagaaacagaggctagcgctaaaacagtttcatttttaatagataaaattaaaaatgaaaatattcctgtagttttatatcctgaattatcaaatcaaaaggttgcaaaaacgatatgcgagtctacaggggctgttccgctccagtttaattcatgccataatttaacaaatgatgaatttgaaaacggcgcaacatacttgagtcttatgaaagaaaatataaacacgctgcagcgtgcattaaactgaatatggagatattatgagtgattttagcagaaaaaatgttatagttattggcggagggcctgccggaatgattgcagcaggcacagcggcagaacgaggaaacaatgttaaattaattgagcagaataagattttgggtaaaaagctattaataaccggcaagggcagatgtaatttaaccaacgcttgcgacgatgttgaaacactgatacaaaatgtgcctactaacgggaattttttatacagtgcattttatacattttccaatatggaggttatcgaattttttaataagcttggcgttgaaactaaagttgagcgcggaaatagagtctttccggttagcgataaaagttccgacattgtagaagcgcttagaaattatattataaaaaacaacgttgaaataattaatgacagagtggattctatacttacggttaataatgattctgatgagaaaagcatggtttccggtgttatatgcagtaacagagggaagatattcgcagacagggtaattattgctacggggggtatgtcatatcaaaagacaggctcaacaggcgatggatatttttgggctgaagagcttggacatactataacggatattcggccttctttagttcctgttaaagtaaaagaagattggattcaagatgttttaggacttactttaaaaaatatatcaattaaagtaaagaactcaaaaaacaaaactatatatactgattttggtgaaatgatgtttgcacattttggattaacaggtcctgtaatccttagtgcaagcgcgcatatgaaaaatattaaatctgaacattatatgatagaacttgatttaaaacccggactgagtgaaaagcagcttgatgaaaggattttacgtgattttagtgaaaatttaaataaagattttaagaatagtttaaataagctaatgcctaaaaaattaatagatccaattattgagatgtctgaaattgatccgttaaaaaaggttaattcaataactaaatccgaaagaactgcgttagtaaaactgctaaagtgtattaaattcagcgtagttgatttttgtcctatagagcaggctatagtaacgtctggaggaataaatgttaaagaaataaatccatcaactatggaatctaaaatcgttgacggattattctttgccggagaaataattgacgttgacgcttataccggcggatttaatttacaaatagcgttttcgagcggctttcttgcgggaacgtcgtgctgaactgcgctgaaatgatgacttaaagtttctgtatagagttgcggaaattacacagaatattattgataaagcatatgtaataacagcagtaattataaatcttgatatagtatctgtaactttaattccatttaaaatttcataagtcgaagtgattatcaaacaatgcacaagatatatgttgtaagaggctccggaaatgctgataaagaatccttttccacggctttctagggattcagtaagaccatacgcgtactggtaaaaaccaaatgttgagaacagacagaataatatcactattgtaggtgagaaaggattgtttataacaccgccatactccatatatgaagttacgcagtgaagtattgcaaaaacaagccagcctgcatagaccaaaagtcttgatttgcttaagaaacgtaagaactcattataatacattccggcgtacattccaagtatccaaaacaccaagtatgacggaaatatcttatgcgtatattcagtcgaagatatcagcattctgaatcctattgaacatacgacagctataaagattattattgtattaaaaagcttagatttatgcttgctgagtaaaatccaaagcggcataagcagatagaactgcattattaagacaacaaaataaaattgagcagataaaactccgttcaaaatatattttatcaatgaaaccggattaaattcataaatatggaaagcataaacaaagatgatataatatatgacgaccataattatatacggcagatatatttttctgattctatctaatagaaacggcgcgtatgtaaattttctttcgctgaatttataaaataattttaacgcacttgtaaaaataaaagcaggtacagcaaaagtagtgagtttcgtaactgtgaaaaacactatagataaaacgctccatttcggaaatacatttatgccctctgaaagcaaatgtattaatataacaaacatacagaggaagaattcaaaaactgaaacttccgtaatttttcttttcatataacatccctctacataatagtatttatattttacactattttcatatttaagtcaatgcttaataaaactacataaattttataaaaagattataaaaagtttatgtagttttattgtatattatagttgaatagttgtgcaaggtctggtataatcaaacttgccgatatacaacatattgtagaatatggaaattttatttaggaggaactgctatgacaaacttaggttggcaaggttttaaagatggtgtttggaaagatacaataaatgttgaagattttattagaaataattatactgaatataaaggcgacgaaagttttttgtgtgacagaagcgaaaaaactgatgctgtatataaaataaccagagaacttattctcgaagaaataaaaaagggaattatagatgttgaaacagaaaaagtttcaggtattgataattttgaccctggttatattgataaagataatgaagtaatcgtgggtcttcaaacggacaagccgttaaaaagaatagtaaatccatatggtggaatgagaatggttgaacaatcattaaatgagtatggatataaacttaataaagacattgagaaccatttcaaagaatatagaaagacacataatgacggcgtatttgacgcctatacctcaaaaatgagggctgccagatcagttggattaatgaccggtttgccagacgcatatggaagaggaagaattattggtgactatagaagaatcgctctttatggagtggatagactgattgaagagaaaaagaaagattttgaactaaaggaatctcttcctgcgtcagatgatgttatcagaatcagggaagaaatacgtatgcagattaaagctcttaatcagataaaaagtatggctgaaaaatatggatttgatatttctaatcctgcaaaagacgctagagaagcaatacagtttacgtattttggatatttggccggtgttaaggaaaataatggagctgcaatgtcatttggcagaaattctgcattttttgatatttatatttcacgtgatatagaaaatggagttttgacagaagaagaggctcaggagttaattgaccagcttgttataaaacttagattggttcgtcatttaagaacacctgaatataacgaactattttcaggcgacccaacttgggtaactgaatcaataggcggaatgggcgcagacggaaggacaatggttacgaaaacgtcttatagaatgctccatactttgacaaatcttgacccggcaccggaaccaaatatgacagttttgtggagtaataatttgcccgaagcatttaaaaactactgtgcaaaaatgagcattgagacagacgctatacaatatgaaaacgacgaccttatgcgccctctatatggagatgactacggtatagcttgctgtgtatcatcgatggaattgggcaaaagaatgcagttttttggtgcacgcgttaatcttgctaaaactttactaatgtcaatgaatgacggtgttgatgcgctaaagggcttgaaggttttgaaatgcacagaaccaatgacagatgatgaatatttagattatgaaaaggttaaagcatcatatttcaaatgtttggaagaggttgccgagctctatgtaaataccatgaacacgatacactatatgcatgataagtacgcatatgaagctggacaaatggcacttcatgacacagatgtaaaacgtttcatggcgtttggagttgccggattgtcagttgtagcggattcattatctgcaataaaatttgctaaagttaaacctatacgcgatgaaaacggtttagcttatgattttgaaaccataggtgattttccgaagtatggaaatgatgatgataaagtagacagcatagctgttgaagttttagaaaaattctttaatgaattaaagaaacatccaacttacagaaatgcagaacatacgctttctgtattaacaataacctcaaacgttgtgtatggtaaaaagaccggaacaacacctgatggacgtaaaaaaggtgaacctttggctcctggtgctaatccaatgcatggaagagacgtaaacggcgctctggcttcactgaattcagtagctaagctaaaatttgctgactgttgccaagatggaatttctaacacattttcaattatacctgatgctcttggaaagagtgaagaaacaaaggttacaaacttagttgggcttttagacggctattttaaacagggaggtttccatctcaatgttaatgtattaaatagagaaactttagaagacgctatggaaaaccctgataagtatccaacacttacaatcagagtgtcaggatatgctgtaaacttcaacagacttacacgtgaacagcagcttgaggtaatatccagaacattccatgagtctatgtaacgtgtaaagtgtatttgtttacacgttgatgtaagagaagaaaatattaatattatagcaaacgccatctgtaaagaatatagctttacggatggcgttaaagcatttatttgttgctaaaaataatatattaaatttacgcaggtgatacattatggaaaatgaaaatataataaaaagtaatattgatataatcggtaatatacattcttttgaaagtatggggagtgttgacggacccggtatacgttctgttgttttttttcagggatgtagtttaaggtgcgccttttgtcataatcctgacacctggggaaccgaacctaataaagtaattacttccgccgatttaataaaaaaaatactgcggttcaaaccttattatgattcatccggcggcggtgtaacattttccggaggcgaaccgcttcttcagcctgaattcttgcttgatatattaaagaaatgcaagcaaaacaatatccacactgcgttggacacatccggagtgggtcataaaggggacaaaaagttcagacctgattataaagaaatactcaaatatactgacctggttttgctggatgttaagcatactcgttctgaaatgtataaagaaattacttgtgtagatatgagtttttttatggaatttcttgacacgctcaattcatcagatacggatgtttggataagagctgtaattattcccggaataaatgacaatatagattatataaaagagttagaaaaatttgctaaaaagattaataatgttaagaaatttgaacttttgccgtatcatacccttggagtaaataaatataaagagcttggtattaaatacagattggaaaaacttcctcccatggataagaaaaaaacgaaggaatgggaagaattattaaataagtcattagtgtaaagcatgaaatttttatatttttcacttgacaataaaggtcactttgtatataattaaacagttgattatttaatctgccctcttagttaagtggatataacaagcccctcctaagggctagtcacgtgttcgactcacgtagagggtgccaaacgccgtatttatacggcgtttttgttttgaataataaaatgcacctttattgtcgatgtatttaaactatcgtatcaatgaaagtgcattttatattatttatatatttttacgcttgtgcagcaaatttttgcttaacctggcttatcttctgttggtcagcctgttcggttggataccaaccttttgctgtcattttcttatatatttcatcctgcatacataatgtgtcatttaatgctttattaaatgagttatttacattagttgttcccgattcaattgaaccatgcatataaaggtcgcatactccctttgttgacatcagcaaactttccataaggttcttatcatccatattattttcatcctttctctgttaacgagttcatcaataatagcgctatgttacactaaattatagaattgtttgaacagttcatcatgcttcattacaagctgtgaaacatagttctttaattcgccgtcttgaagattgttggcagtatcctggcattgtgttttcaaaaattgttcatggccaagagcgtcttcaatataaagtaattcttttggactcatcttctcacctccagttattttatatatctattatttgtaattgctgttaaaatatacatgattttatttttattcttacaaaagcggatttgaatcctgagcttttaatctttcccatcttcggtcaatttccccctgaatctcatctactatatactcatattttttatccttaagatgttttgttctgcccatcatactcagccattcaagtacatttattttcttgtttttatcctctggattataatttatattagttattccattctctatttcatatagaggaaaataacagcagtccacgccagctccaattacctttctttctaggtttggcttatcagaccaattcaaaggacaggcagaaagagtacgtaaataagacattccgctttcctgtgaatacgcttttgccttactagctttttttatgaaatccgctggatttgattctgccacagtagctatatatggaatacctgtagcagacattatttgaggcatatctttattaaaaaatgacttgccgtactgatattcacctacatgagaagttgaactttttgcgccttttggagttgaatatgacaattgataaccggtattcatatatccgccgttatcatattcaaatagaataatatgattatttcttaatgcagtcccgattgcacttcccattccaatatccatgccgccgtcaccgcttaccattatgaacgtaatttctcctttcggatactcgccgcgcttttgtctctgatgaaacatttcaacaagacctgataaagttgcagctccgttttggaaaagattatgaacatatggaatcttaaaagaagtctttggatatgcggttgtaacaaccatgccgcagcccgtatggaacagcagtacaacgtttccttcgatacctctcagaagtaaattgacattcaccggtattccgcagcctggacacgctccatgaccaggagcaagtctttttggcatttttgtagtttcatttattcttccgcctgatacttccatattctgcttatcatcgttccatttgcatgttgttagaccggggctggattcttcgtcggttataggattaaagtattgagtattaggcgtactcatatcgcccggatatattcccttatagtcaaatgatttagaatgtgaatctaatccggcttctaaaaattctatagcgtcttcaacataaaagtctcgtcctccaagaccatatattcttgatataacacgtgtatccaactttgcgtcttgaagcattgcttttatttccagcgtcatatttccgccgttagctccataactgtcttgtctgtctccaacaataattgtttttgcattcttgcatttctgagcaagctgttttgctggaaatggtcttagaacatttgatgtaaatactcctactgattttccttgttcacgtaatagatccacagccatttttgctgtatgatagcttgaacccaataagaataaaataacttccgcgtcatcggttttgtaactttcagtgaattgatattctctttcagataattttgaaaattctgaaaaaacttcaggtattacttttctggcatcttccatagccatatgaagctgatatttattatttaaaatgtcaggttcattcatataggaaccgatagaaacaggttgttctaaatcaagtgccgaatattctgcattatatttacctataaaatcttgaacggtcttatcttcttcaaatacataacaacgtcgtttttgatggcttgtaaaaaatccgtcaaaagctactatgaccggcaattttaccgtttcagcaatttttaaagcacaaatattaaaatcataaacggcttgaggagtgcttgcaaaaagtattatccatccggtgttaagagtgtacataatatcactgtggtctcctttaattgaaagaggaccggatacagttctgcaagcgacattcataaccatcgggaaacgtgttccggattgcacaggtaattgttctaaggcatataaaagtccatttgcgctggttgcgttaaaaactcttccgccgccggttgacgctccgtagcatattcctgcagcactgtgctctccctcggcaggaataagagatatatcatgttcaccattagctttcattaaatccaaatattccgctatttgtgtggatggtgtgatcggataatatcccattacatggtaattaatctgttttgctgcatatgcggctaattcattaccgctttcaaataaaagtttttgtttactcatacaatacctccatccactcttttttcatccaaataagcttcgctggtaacccaactatttgcacctgcatcttcatattccaatttatctacaatcaaatctttatttctgacaaaccattttttatctggatgttcacgttcaagtccggcaactaaagcgtttgtaggacaaacatcaacgcatcttagacatcctttgcaatggtgataatctaagcccatattaaccatagccggtttttctttgtaggtgccaggcataaactgaaacaccatatctgggcatgtagtgtcacataagccgcagtttatacatttttcttgaacaaataaaggaatataaccttctctggaggctgacagatcatttgatacggtgctgcctatccttgtattgatacctccgattggagcattttcatatccccagcgattttctgcttctttatattttagtggttctattttattattacgctcaaaaaacttggaaatcgtctcattatatccgcgtcgtacaccatcaatatttttttcgattaaatccggatattttttaccaatagtttcttcagttatttttatagcagcgtccaaaggaacaaagtttgacgctttacatattgctccaagcataaccatatttattcgtgttttgctttccattgctatcttttgtgcgtctatacaaaatatctctccgccgcaaagatttaaagctttttgtatatcttcaggagagcgtgaagtgtttataacgacctttgatttttcagttaatccggctgttacggggactttacctgtcatcgcctcgtgaaaaagccccagtatatgcggtgactctatcgggctgttaagctgaatctcaacatctggctcgctccatcgaatatgggctttaaccggcgaacctcttttttctgaaccataacttgaaaaactggcagcgttcagcttaaggcatgtaacgcccaactctcccaacatttttccgcaaagattagctcccagtccgccaatgctctctagtcgtatttcatagtaacctcggtcatttttaacaggaagtttttcttgatccataataccacctagctttcttataatctattgttattatttcacaagacataaattttatgtaaatatataaacatagaaagaataaatggtaatagaagaagatgtataaaaaaatcaaattatattttgctgtaagttgatacatatcagatttagttattaaatataaaaaagtcagtctcctgtttatggaaactgactgcagaaaaatatgatagtaagttttttaactagatttctttttttattccaatatcttttctaaagtgggcattcttaaagtttactaaatcaacatatttgtatgctttttgaattgcgtcttcaagattatctcctagagctgtaactcctaaaactcggcctccatttgttaaaatatcattatcggagcgttttgttccggcatggaatacaagtgctcccaaactctccgcttgttttataccatcgattttatatcctttttcatagtttttaggatagccgcctgaagccataacaacacatacacaggcatcatcgttccattcaatatctatttcatcaagcctctggtctattacagcattaaatatttcgcataagtctgattttaaccgtggaagaactacctgtgtttcagggtcaccgaaacgacagttatattctattactttaacgccatctgcagttttcatgagcccaaaatataaaactcctttaaaagttctattttctgcattcattgcattcatggttggaatgaatattttttccatacattcttctgcaacttcatcggtataaactcggcttggagaaaacgtacccataccgccggtattaggtccctcatcattgtcataagcacgtttatgatcttgagcagaaaccattggcttcatagttttaccatcggtaaatgctaaaacagaaatttcaggtccggttaaaaactcttctattaccactttagcaccagcagaaccaaaaactttatcatctaatatgtcatgaactgcattttcggattcctcaaatgttttagctattataactccttttcccaaagcaagaccgtcagcttttactacaaccgggaatttgttatttgctttaatataatttattgcgtctgtactgttttcaaacacttcataatctgcagtgggaatattatattttttcattaaatctttagaaaatgatttgcttccctcaatgattgcagcagctttattaggcccaaaagctcttaaaccatttgcttcaaaagcgtcgactgcgcctgctgcaagaggatcgtcaggagccacgacagttaaatcaatattattttctttagcaaatttagttaatttctcaaaatccatgacatctataggaacgcactctgctaaatccgcaattccgccatttccgggagcgcagtatatttttgatacatttttgctttgggcaagtttccaaataattgcatgttctctgcctccgccgccaattacaagtactttcataatcagttctccttagtaaaaattaatattatttatataataatattttacattatttttattaaaaacacaatagttttaaataattttataaaaaatggctcaggcagaacctgagccgaaatattttattagtcagatgtataaggcatcaaggcaatctgtcttgctcttttaatagcaactgtcagctgtctttgatgttttgcacagcagccgctgattcttcttggaagtatctttgcgcgctctgttacatatcttctgagctttgcaacatctttatagtcgatgtaatcaactttatcaacgcagaatgagcaaacttttctcttaggacgtctgccgcggggtctgtcgtttcttctttcttcagccatcttaaactctccttaactttaaattttagaacggaaggtcatcatcaatttcagataacggagtaaattcatcttcttcaagtccgccgggcatttgttgagctggagcagtataattatttgactgctgctctgcaccataagaagaatatgcttgctgctgcggagcattattatatcctcctgaataaccgttgttttcttctctggactttttagattcaccaaagttcacttcatttgctataacttcagtaacataattcttttttccgtcttgaccttcccaagtacgggtcgaaattcgacccgcaacaatcaccatcataccttttgtgaaatatctgccgagaaactcagcttgattttgccacgcaacgcagttgatgaaatctgtctgtctgttttcaccatatccattatcaatagctatagaaaaactacaaacagcttttcccgtactggtgtgtctaacttcgggatcacgagtgagtcttcccattaagattactttattaatcataattagtcctcctcacgtctaacaacgatgtttcttaaaacgccgtctgtgataccataaacacgttcaagttctttcgggaaatcagggtttgatttaaagttaaccaatacataataaccttcattcatgaaattgattggataagcaagcttacgctttccccactcatcgacactttcgatttcaccgtgtttttcaatcaatgacttgaacttttcaagcaatgcagagatttcttcttctgttttagaagcgtctaaaaccataatagtctcatacttgttgatatgttctgccatatttgtcacctccttctggactttgacccctataaatataggagtaaggaattgtatatttataaatttatacaactaagttattataatatactttaagaataatgtcaagaaaacatctgaagaattaaagatataataatttgggaattctaaaactttatttggtaaatatgtacaaaagttttagttttattttatacaataaattttcaattataatttgcattaaataaaaaaatatgttaaaatcatctgtattaggaggaaataatatgggaaatgatatgaataaagtagaagcaggtaaaaattatgttattacagtaggccggcaatttggttcaggcggcagaaaagttgctaaaaaagtagcagatatgcttggaatagaattttatgataagggtcttattgctattgcagcaaaagaaagcgggctttcagaaaatctttttgaaggtatagatgaaaagccaactaatagtttattatattctttagttatgggtcttcaatccgatagaaattcattttatagatatggcgatgttttgaattctgacgctatttttagaattcagtctcaggttattcaggatttggttaaggataattcctgcgttctagtaggaagatgttcagactatgttttgagaaatcaagataatgttgtaaacatttttattcatgctaatgaagagtttaaattagaacgcgttatgcgcatctataaacaaaaagaaaaagaagctcttgaaacaatgaaaaagaccgataaaaagaggagtaattattataatttttatacaaatcaagagtggggaaatgttacaaattaccacatatcggttgacagttccgctcttggtattgatgacactgcaaagataatttgtgattttgtaaaactaagatttggtataaaataatttctttatatattaaataatattttagaacagctttttgcatttatagtaaaaagctgttttttgttaaaaactatttaaaaaaatattttttatacatctcttttgtacaaataaactgtattttctacggaataattgtaaactggtattaaaaactataagacgtttggctattgattttatatgtaagtatgctataatttgaataaatatataacccttatgggaaaaggaggaagcaaaatgttaaaaaagagatggctgagttttgtcataatgattacttttgtttttacagtttttgcaggtgtaacagtattagcagaacaaactgaaaactcaaatgtttttgttattaacgaggcttatttcaatgatgccggtaaactatatattagttatacttcaaatggtgaattaagcaatgcagtattgttcgttgtaacttatgaggatagcagtgaaaaaattataactgattgtgcaaaatttgatataggaaccgtaggagaagaagtattggattactataaacctgaaagcgggaaaactaaattatttatttgggatggaactaacaatattataccactcagcaatataaaaacagtggatagttctgaacctgttagtgaagtaacaatagatttcacaaaattaagtgaagtcccggtgtataataaagataatggtcaggggtttgttgataaatcacataccataatgccggaatcttatatgagacaggtgggagcgacagataatattaagatttcatcagataatggagctacagttacagaaacaacaggctcatatttgcattatggtggtgataaagattataattacggcggtcttatttacagaattgacactgggaagccgggtgcatatcatatagaagttgaggtaacaggcacatcagcggatacttgggttgctcctacaggtatgcaggcctcacgcctgacaagtacaagtaattgggataactgcggtcaggttccgagaacagtaagtgctcaatggaatggaaacacatggttttatgattttggtacaggggaaaattttattgaaatcgatgtagaaccttccaaactgccatcagaatcatctccgaagactgttggtattaaaaaaattaaagtgacgccgcttgaaaataatgcgacaggtgataagccgacaattcatatcttaggtgactctactcaaaaggcttacagtttcaacgaaactataagttcgtggggacaaacacttaaaaattattttgatttaaacaaggttaatgttgttaattactcaatgggcggccgtgctatgaagagtaactatgatgaaggcagatttgacgaaattcttatcagaggtaaagtcggcgattttgtatttatacattcagcacacaatgacgagactgtaagcacagatagatacgaacgtggttcttctgtaaaagaaggcgatcttgcagccaataatgcaaactataataagtggctggatatgtatatgacagctataaaagaacgcggtatgacgcctgtacttgttacagcaatgccgagaaccggcagcggaagatattcggaaagctctaaaaaacctaatggatttgatcccgattctccaggtaatatgcgtgaaaaggccgcttcggattcagaaatcggtttggttgagctttacagtggtgcaaaagcgtatattgatagtttagattcaaatgagatattctatatctataacacatatgaggcaggcgaaactcctgcaatcaatgcagctaatggaacaagaggagacggtacacattatcgtgaagctatagcaaagcagtggtgcagaattatgctccaaagcatatatgaccaggctaattcagctgatgacatttataaagacaaagagataatgcaaaaattggtaagttacatgcctgaaaatgtccaggaagcagcaaaatcaggcaattggtctgctgtatttcccgaaatggcgtcagatgtgagtacagttggcataattcccggtgcggttaaacagagcaagaacaattattattataggccaaatattgaaaaagctcttgaagttggtttgctccataaggacagcaataacaattttaaaccaactcaaacgattacggttggcgaatttgcaaggggagccgaaaaagcatttggtctagaagaaaattcacttactaattacaataaaacatatgctgaactgcaaacaaagaacgcagaagtatcagaaacgacagtttcggtttcatcagataatagtgcagaacttgctgaaggtgaggttacaatcaatgtaacacaaccggcggcgggtggtactgtaacagtctataatgagagtgaatttcacacagcaactactgatattacaagtaaggtaacagcaaactctgtactgggagataatgaatactatacatttaaggctccgtcggagatagttaagaaggtagataatggtggtgtgtttgcattaaacaaaaatattacaacatcggctattgaaattcgtaataacggaacaaaacagcctgagtatgtggcaaaggaagacggtgtactcactctttatcttatgtttgttgaccataaaataattacatgtgaaaataaaacagacggtacaacatctacaaagtatataaataatactactattgccggcacaacaaaagataataaatataatgctgtgacttttgatgtcaaagctggaaagacatatcaagtttatacaaatggcggcacaggaagattgtttggtattcaatatgagtcaaatgactatccgcatagcacaacttcactagttgcaaaggctaatgacaaaatcaaagttgttgcgttgccaaacgagtattatattaataaatcaatcttagtagatggagaggttattggaacttcaaaagaggccacctttactgcaaccaaagattcaaatgtaacagctgaattcacagcggaaccacctctggtggaagacactatagttgctagtgacgcagctcttacccgtgaagtgatgggagcaattctctatgatgcatatcaaaaagcggacaaatcaattattgatatgtatatagcgcaaaatggcagtgttccatcacctgatgaccccaattatgatccaaatatcaagtatgaaggtactccgtatataccgcttaccggttggggcgtactagatgataaggcagcgattaatactgacctttatcaaaaactcaaaaaggcgtataatctaggtcttatcagaactgagagcggaattgctagaggctctgtttcaaatggtaaaattattgaaccaaagatagaggtaacccgagctaaagcagctaaatcgctggtattttgctttatgcttactcaaccaatgggaaatgaaagtcagcttctgccaaacggtaaccaagctgcactaactcaagaaatacagacagtaaacacaaatgcaccaactgtgccaataaaataatatattaatgtgttagaaaaaagaaccctacatttggcattttaaaaaaagttatcttttaatttaaacagtgttggataaaaaagtataaatcaattgctggatgttaataaataaaaaagcgaagattctctgttttaaagagatttatcttcgcttttttaatataaattttaaaataatataagtaatttaattattataagtcataatataatcgtccattacataattatttccaatatcagttttagtactgtcagttataataaaaccaaaatttttatatgcagatatcgctttagtattgtttttatttactgttaaataaaatagtttatatttatctctatattctattaaaactttgttaaacagtttcgtcgcaagacccttacgctgatatttgggatcaacataaattttgcttataaacaacttatcattttccggtcttattccgcaaaaagcaattactgcatcatcttcttgaataatataatatacataatcattatttttgatatcattttttaatacatcaaaactttggaacttctctatcatataatctacttgaccgtcaggcagcaaattatcataagcgtaatgccaagtaatttcagcgcactttgcaatttgttcaatctctttatctgtttgagctagctttatattatatttattcttcaaaacttttcacctcaactatatttcaacacgccagtttaatgcttttccaagcgttacttcatccgcaaattctaattctccacctacgggaactccatgagcaatttttgtcaccttaaccccaaaaggttttaatagtttagatatatacatagaagtagcttcaccctccaaatttggattggttgccattattacttctttaataccgccctctgcaacccttgcaacaagttcctttattttaatatcgtcaggcgttatattatccatgggtgaaatagcgccatgcagaacatgataaacgcctttatattcatttgttctttccatttgcataatgtctcgtgggctttccattacacaaattatactgtggtcccttgcagtatttgaacatatattgcatacctcagattcagatagattttgacaaactgaacagtatctaatgttctttttggcattaataattgcgttagctagtttagctgatttttcttcagggaggttcataacatagaaagctagacgctgagctgttttatttccaatccccgggagtttattaaattcttctattaattctcttagtggcgctgcgtattgttccatctatatatctcctatttttttgaaaattaaaatatttttagtttatcttttaaacctgaaaatcttctttgaacattatcattattcacatactgagccataacgccttcttgaccgaccaatacaacaagtgatttagctcttgttatagccgtataaaatagatttcttgtcatcaaaagtctgtgtgtttcaaacattggcattactaccgcatcaaattcacttccttgacttttgtgaacggttatggcgtaggcaagctcaatttcatctagtaataaaaaatcataaacgactattttatcatcaaactgaatagtcattttttgtgctctgctgtcaatatctattataaatcctacatcaccgttaaaaactcctaaacctttctcggcatctcttttccattcaagctgataattattttttatttgcataactttatcgccaactctgaaaatacaacgtcttgttatatattcttttttgtcaggagatggtgggtttaaacagctttgcagaattgtatttaaattttgtactcctatcaaagattttctggtcggcgttaaaacttgtatctgcgttataccatctaatccataatatcgtggtaaccgcctgacgcataaatcagctatagtattcggaagctgcattgggtcatctctgtgaacaaagaaaaaatcgttgtcattatcattcaaaagaggttcttcaccattattaacacggtgagcattaacaactatcatactttcttttgcttgtctgaatatctctgttaattttatacactcaatgctgtcgctgtcaattatatctttcaagacatttccagctccaacagaaggcagctggtcactgtctccaaccataatcaatcttgttctggaggataaagcgtcagtcaaatgtttcattaatataatatctaccattgacatttcatctattattaaaacatcgcaatccagcggattttctgagtttcttgcaaaacagctgccaacctcgtcaactcccggtgtaatctctaaaaggcggtgaatggttttggcttcaaatccacagacttcgctcattctttttgcggctcttcctgtcggtgcagctaacataaccttgttatgttcaattttcattgcgttgataattgtatttattattgtggtttttcctgttccgggtcctcctgtgataaccaaagctgcagtctgaaaggcacgtcttaccgcttcacgttggttttcactaagctcaattctgtcttcgctttctactttatcaattaaattatcaatttgacttatatctatatcaaatgttacgccggacattctaattagtttttcggcaacctcacgttcagcgtcataaaaaagttttaaatatattgcgtcatagtcaccctggttttcagatattaattcgccgctgagtaataattgagaaattgcgtcttctacaggtccctgttcaacttcaagcatagaaacagcttgggcaataattgtgggtcgcggaagatatgtatgaccgttcaaaaaggaaatacgtttaataatagacttaattccggaagctattctaacatatgattttgtttcaaaccccaaggacatagcaatttcatcagctttatcaaatgtaattccatcaatttggtctgctaaaatatacggattattttgaaccaaaggtatagttccagtgccgaaaattttaaaaactttaacagcagaagagggggaaacattatatttttgaaaaaacataacaatttgtctgatacctatttgctcaacaaatgctttataaatatcctcgattttgctttttgtcagcccttttatttcaagcagtttttcgtggtcattttctataacgtcaagtgcgtctgtgccaaatttttcgacaatttttttggcagtcatttttcctacatatggtaagattccggaagctaaatatttttcaatttcactttcagaagatggcattacgcgttcaatatactcaactttgaactgatcaccatagtcaacgtgagttgtccattcacctgaagcaattattttttcaccctcagttatatttggcatagttccagtcattgtgacaagctcgccaatacatgatacatcacagactgcataaccattatcagagttataaaaaatcactgtatcaataattccttcaatttttatcatatatgtgtacctgctttaaaattattataattgtatattttataattatatcctaacagatattgaatagcaacaagttataaaattaaaagataaattgtaatataattttaatctaaaaatactggaaataaaatcagtagaggtatataataaaaatagaacattgcacaaaataaaaattttgtgacaaaagatggaagatgaaaaaaataaaaagaaatgtgtgattattatgaacaatattaaatatgcgcctgaaccattgcattctttcttgatttatcttgaaagtattcagggcaaatcaagaaaaacagttaatgagtatttttatgatattagaacattttatagatttttatgtttacactttaatcttgtaaattcaaatattgattttaatcaaattgacattgataaaatcaatattgattatttaaaaaaagtcgatttaaatctgctgtatgaatatgctgattttttaaatcgagacttaggaaatcaagctagaacacgtgccagaaaaatttcgtcattgagatcgtattataaatatttgtgcagcaaagttaagttgcttcatgataatccgacagctgatttggattctgttaaatttgaaaactcgcttccaaaatatttttcgcttcaagatagtattaatttattaaatgctgttgatgaacgaaattatgaacgagactattgtattttgacattgttcttaaactgcggtatgaggcttgcagaattggttggaattaatattacagatatacgtggggacgaattagttgttacaggtaaaggaaataaagagcgcactgtatatcttaataattcctgtatatcagcaatcaagtcatatttaaaaatacgccgaaaaatgtcacctgaatcaaaagatgaaaacgcattatttttatctgaacgaaacaaaagaatcagtcggagaaccgttcagcatatagtagaaaagtatgttaaaaaacttggaatggattctcataaatataccacgcacaaattgcggcatacagctgctacattaatgcatcaatcaggtgttgatattagaatattacaggaaatattaggtcataaacaattgagcacaaccgaaatatatactcatgtaaacaataatcaaattagagaggcagttgcccaaaatcctttatcagaaatcgaaagtcaaggtccgaagaacaaataaatttattcttgttcttcggacagtttggtccaattgtcataatactcttctaaatttgaatttaatttctcaagctcgctgtttttttcattcatcaaaatataatctgaaaatacttcttcctttgtcatttcattttcaagcgctgaaatttcttcctcagtcttagaaatcatcttttcaagctcagcgatttgaagttttcgtttagtttccgcttttctctgttccttagacctatatcctccgctgcttttttgtgatgaattatttgtttcaactttattatttgtttctatagattgtttctgtttaatccattcttttctttgcttataatactcaaaatttccgtcataaattgtaaaaccgtctttggtcatttcaattattttgtttggcactttattgagtaaatatctgtcgtgcgatacaaacaataaagtgccgtcatactcgttcatagcttgttctaaaatttcttttgagggcaaatccagatgatttgtaggctcatcaaataaaataacatttgatttttccagcataattatacagaacgctagctttgctcgttctccgccgctgattacttttacaggtttataaacgtcttcttttgtaagtcgaacatttcctaaaactcttcggatttgagcctccggaatgcgtggaaatctgtcccacaattcattaatagctagattatcgggatttaaatttaaattttcctgctcatagtaacttacgcttgtgttttttccccaaacgacagaaccgttttggtggggaattatatcctgaattacttttagaaacgatgacttgccaattccgttatctccaatcagagcaaccttatctccgcgtttaatactgaggtttaaacctgaacaaatatttttaataccgccggcggactctctatctccaacaacaatgtctagattttcaactgttaaaacatctttataaggttctttgatagtttcaaactttaatttaataggcttaatatcatcatccggcttttcaattaattccattctctcaagtgcttttactcttgatttggcgcttcctgacgtagaagctctggttatattcttatctatatatgtctgcatttgagaaatttgaagctgctgcgcctcatactcttttctcaaaacctcatttctttcttctttaagaaccaaatattttgaatagtttccgttataagaatacatcttaccacgctctatctccaacatattctctactgtgttatcaagaaaatatctgtcatggctcacaatcaaaagcgaacctttgtaggagttaatcaaataattttccagccagtcaagggttttaaaatccaaatgatttgtaggctcatccaatattaacaaattgggttcttccaataagagagccgctaatgcaagtcgggtcttttcccctccggataaaacatttatttctgtctctaggcttctatctgagaatcccagtccgtttaaaaccgtttttatcttgacgtcaatattataaccgtccatactctcaaaataagactgtttttttgaatattcagacattaaacttttatattccgatgaattatgttctgaatatgaaagcattttttcctcgataagccttagttcatcctcgattttaataatgtcagaaaaagcattgcgcatttccgatattattgtggagtttctgtcaagaccgctattctgcttcaaatatccgattgtcaaatttggagatttatatatatcaccgtcatcgtaatctagctctcccataattatactgagcaaagttgattttccggctccgtttacgccaataagaccatagcggcaattatcctctatggtcaaattaatatcttttattatttgattttctccaaaacttttactaagatttgaaattgaaattaacatttatcgtattcgtatcctgcctttatcatttcaatatttttttcagccaaattcatcttttgagggggaatatgagtttttacgctgtcatataagtcatctgctgaaaacattgtttctctagcttttatataagctccggtcataaccatatttccaagctggctatttccgaaactttcagcaatttccatagccggtatgtatacaactttaacatcagagcgctcaacttttaagtctatcaaagagctgtctaatactattataccaccaggttttacagtatcaacaaatttctcaagtgacggtttattcatagcaataagtgtatccggtgactggataattggcgagccaatttgattatctgaaattataacgctgcaattgcatgttccgccgcgcatttcaggtccataagatggcagccaagagatattctttcctgtatccattcctaagtaagccaaagttttcccaacaaacaaaacaccctgaccaccaaatccggctataacaatttgttcatacattatctaacacccccggtcttagtgcagtctttataaacacccaaaggaaattcaggcatcatttcagtgcgtattctttcaagcgcttcaaccggtgacataccccagtttgtaggacaagttgaaagaacttctaccagtgaaaatcctaatcccgccatctgacattcaaatgcttttctgatagcggactttgttttctttatattgggaacattatccacagataccctttcaacataacatgcgcctcttaatgttgacaccatttcactgacttgtatcgggtatccctgattttctacttttctgccgaacggcgtagtttgcgtaacctgattcactaaagaggttggcgccatctgaccgcccgtcatcccataaattgtattattaacaaaaataattgtgatattttcggctctggcagcagaatgtatagtctcggcagtacctatagccgccaaatcgccatctccttgatatgtaaatacaagattttcaggatgtactcttttaataccggttgctacagcaggcgctctgccatgcgatgcttcctgcatatcgaattcaaaaaagttataagccgtaacgctgcatccaaccggacatacaccaatggtcttaccttcaagtcccatttcatcaaccacttctgcaattagcctgttaataactccatgtgtgcagcctgggcagtatgagagtactacatcgctgagagagtgtggtctatcaaatattttttccattttattttcatctcctatgttatgcatttgcatcaagacatttttttatttcttcaagaatagcgtcctgctgaggaaccattccgccggttcttccatagaaataaacaggtttctttccattaacagaaagcttaacatcttctatcatctgacccatgctcatttcaacgcaaaggaatgatttagctgtttccgcacgtttttcaaaaacttttgccggaaacggccataatgtaataggccggattaaaccaacttttaaaccattgtttctagcttcttcgacagcagacattgcaattctagcaatcgttccatatgcaacaataattaaatctgcatcttctgtatttatctcttcatataaagattcagtttctcttattgtattatatcttttttctctttcgatacaaagattttcaagctcttccggcgtaagatataaagaattaactatattctttttacgtttcatacctgttccggtagttgcccacggtttttcaggaagactttcagggtcaatatactccttaaactctacaggttccatcatctgaccgagcattccgtctcccattatcattgccggcattctatatttatcagctttatcaaaagcggtcgatgttaaatcagcaagctcttgaactgaagacggtgcgtatactaatagatgatagtctccatgacctccgcctttggttgcctgaaaataatcagactgagcaggctgtattccgccgagaccgggaccgccgcgaactatatttactattaagcatggcaggtcagctccggctatgtatgaaattccttcctgcttcaagctgatacccgggcttgatgatgacgtcataacccttgcgcctgcgcctgctgcaccataaaccatatttatagccgcaacttcactctccgcctgtaaaaatgttccaccgtttttctccattttttttgccatataagcggcaagttcggtttggggagttattgggtagccaaagaaaaatctacagccacagcgcattgcagcttccgccaatgcctcgttacctttcattaaaaccttgttagccattttatctatctccttatttttcaattgatattacgcaatcaggacacattgttgcacaaaacgcacaaccaatacatttatccatatcaataactcctgccggatgatatcctttatcattcaaaacagcagaatcaatagcaataatttttttaggacagacagacacacaaagtccgcagcctttgcacctgtcttgtctaaaactaacttttggcatatttcttccttctttctatacagattatcatacaatatattaagggaatgaccccataattttatagtttatattaaaatccaggaccaacaaaaagtcttagcggaaaacaattataagtatttatatcagaatactcggatatttctgcaagtattttaggagttgcggttataaacttaaccggaatatttgttttaacagaaaatttctccgctaacttctgaccctctaaaagaatctctttattagtgtactgcattaaatgggtattatttactataccggtaaaatccagtctagaaacatatttaatttcattatatatttgtaaagcatcatctacactctgcgtaagaagacgtctttcgtttaaaacaaaaaacatatcatattcttcttttagaaaatgttcgttataaactcctaaaggggtggctccatcttcatcgccgccaacgtcaaaaacaatatactttgatttattatcaaaagcgcgcaaaatttcaggaggtaaatatgggttttctatattcaaatttgcaaattcaggagaaattacatctattttttgatttaataaaaattgttctgcatcttttgttctaaaatatgggtttacaatgtcaaaatcaataattataacatcaagtcctaattctttaagcgccaaagcataattgagtgcaaattccgttttaccgcttccaaaatgcccggtaatcacggttatgcgttttacatcatctttatttaaattataaaacacagcatcatttttcattctgtctcccagttattcatcaatattttgtctttcaactgactttatggtaaattcactgtctatattcctaaacgaaaatttaataatcaaaaaaccgactgcaacaaataatgcagcagacactagtgccataatgtcacgcttagttaaaacatacccgacaatggctccaacaactaataaaatcgctaaaagaccatagccaataaaagcatatttcataacttttcttgtatcttcatatagtgttactatgtcacctttattgagattgagctcatttttagcttctacaataatagcatttgaagggcatcctttacagctgacacattttcctccgcaggcagattcacggtcaattctaatttttgcaacgccattttttatttcaactacatatcctgtttgttccatataaataatatcctcggtttaaattcgtttataataatattgtcattacccaatgattatatatttaattttattgtatcattataataaatttcaatcatattgtcaaatagataataattactcagttgtaaatatattttatataaaagaatctttaagattttttgcctgctgaagcatttcttcggcagcttttaaagtagtatccgttacagatacccctccaataattctcgataattcatcttttctttcttcagttgataataaattaacgaatgttctcgtttttgtttcatcactgtctttatgaattagatagtggaaatcacccatagaagcaatttgagccaaatgagttatacaaagcacctgctttgttcttgaaattttacatattttttccgagattttctgtgcggcccgtccgcttacgccggtatctatctcatcaaaaattagagtgtcaacaatatcgccttttgataatattgattttattgccagcattattctggacatttcaccgccggaagctattttgctaagcggtttgagattttcaccgggatttgtggaaatcaaaaactctatgtcatcacatccgcttattgtaaaatcagattcagttatccttactttaaagactactttattcatgtcaagttcagcaagttctctcattatggattcagctaaaaattccccagcttttattcttgtttcagttagtttttttgctgttgcggttaaagcgtttttagatttttttacgtcatcttttattgcttcaattgtattttctaaattttcaatttcggctatttcctcttcacatctattgcagtactctaaaacagagtcaatatccaagcagttatatttacgttttaagtctgctattaatgcaagtctattctgaacaatatcaatttcttcaggttcataatctattccgtcgatataagattttaattctcttgttacatcgtcaatatcagcaagaactgaagagattgtatcgtaataattgcttaacttctcatcatactcagcagctttttcaagactttgatttgcatcataaagcatatcgtatgctgattttgtcatttcatctccatacaatgcgttatgtgcctcaatggcattagacattatattttcaacattcatcaaaaactcgcgtcgttttattagctcctcttcttctcctggtcttaaagaagcagattttatttcgttaacttgaaattttaacaattctattctatgttctttatcaatttcggactgctgtagttcttcaaattttttaagaacttttgaatattcaagatatttatttgaatattcagccaatatatctttatttccggcaaaattatctacaaactcacgatgttttgaggaaacaagcagcgcctgattatccagctggccgtgtatgttcaaaagcatatttccaatctcacgaactattgaaagaggcgctgttctgccattaatcctgcagctgcttttgccgtctgcggtaatttttcttgataaaatcaaagtattatcttcaagttctatatcatactctgtaagtttatttccaactgtttcatttacttcaaaaactgcttgagaaaatgcgtattctgttccgtttctaaccaaatcttttgctgttcttccgcctaaggccatatttattgaatcaattaatattgattttcctgctccggtttctccagttaaaacattaaaaccggctccgaaattaattgtaatattatcaataattgcaacgttttttatttgaagttcggttaacatccactcacctcagtcgatatttttataatcatcttttaatcagataatttatttctaagcacatcaaaaaagtttgtatgctcctgtttaaccaataatgttgtatactttgattttttaattcttattttttcggatgaatctttaaacttgtatattatttttccgtcagcgcgagcaactgcttctgttctaaaaggcggaatctgtgttatttcaactgtgctgtttccaggtataacagtgcttcttgcctttaatgtatgagggcagataggagtaataatcattgcatcaacttccggatgcataacagcacctcctgctgagagagaatatgcggttgaacctattgcggtggacactataagaccgtcagcagagtaacgacccatattagttccatctacagaagtagatgtggttatcattttatatgaatctcctgtaactatcaagtcgttaagcgctagaaaattacagatttcctgattatctttagaaatgatacttatatccagcatcatacactcagttaacccgtaattattgtctattacatcttttatggcagaataatcacctttatccgtttgggttaaaaaacccaaagtgccgacgtttatcccaacaataggaatctcatattttgcagcgtcaacagcaatttctattattgtcccatctcctccaagcgcaattaaaaaatttgcctcagaaaacagaatattacgtggaacaaaagaataatttataccgatatttttacaaaaatcgtacagatcagacttatgaatgtcttcaaaaaaaatcttacattcatataaagacagatactttattaagttttttgtttccaaataattctcatctttaagtgtatttggaacaatagaaatctttttcatatatatcaccaaaatttattccagattatttaagctgtgtgaattttcaactatctcattaatatttatatccgcattatctccggtttttcctataaacattaagtattcaatattgccctcaggaccttttatcggagaataatccaaacctaaaactttaaaaccaatctctttagtgaaactaatcacttcttctattacctctttatgaacgttgatatctctaacgacaccttttttcccaactctgtctcttcctgcttcaaactgtggctttatcagacacacgccataaccaatttcttttaaaagtttaaaagccggaggcaatataagcttcaatgaaataaaagaaacatcaactgaaaaaaaatcaatatcgtcactaatttcatcattagttacatatctaaagtttgttctttccatgttaataactctgtcgtcagtacgcaaattccacgctaattgtccatatccgacatctatcgaatagacgcgaacggccccatttttcagcatacaatctgtaaacccaccggtagaagcgccaatatccatacatattttgccggataaatcaattggaaaaacctttaatgctttctctaatttgagacctccgcggcttacatacttaataccattatctctaacttctatagtttcatcaccttttatttgttcaccggcttttaatgctttctggttattgacataaacacttccggccataattaaagactgtgctttgctgcgagtttcaatgtatccgttttctactaaaaaattatcaagtctctgttttcccataacaatatatcacctcagtaatttttttattttatccgctatagactgcggtgataaaccatacttttcctcaagttcttttacgcttccctgagggattggctcgtctttgtaagcaaatttaacaattgagcggtcgagctgagactgaagaatttctccaaacccaccgattattacattattttcaattgttacaacaattttagctttattgctttctcttcttatagttgaaatatcaatcggtttgatacaaaatgcgtcaaccaaagaaactgaaaatcccatatcatttaatagtttttttgtttccatagcgtttttcaacatcacaccaacagaaactattaatacatcaacagtattataggtctctaacaccttagccttaaaacagtttctgtattccaattttggaaaagaaacatttgagaaatctgaacggtataagatagaacctctgggataccttatagcaacaggtccatttaaatcatttacagatatatttagtatagcttcaaagtcttctgctaaagcaggagaaaaaatagtcatatttggcattggtgaaagatatgatatatcatatactccttggtgtgtttcaccatcagcacctaccggacctgaacggtcaattgcaaaaatcatatgaagattctgaagtgaaacatcatgaagaatttgatcataagctctttgaagaaaagtggaataaacagcaaaaacaggaactattcctgctcttgtaaaaccggcggaaaacgtgaccgcatgctgctctgctattccaacatcaaaaaatctttgaggatacttctgagaaaattcaaccaatcctgtgctgaatggcattgcggctgttattgcaaccaaatctttatttttttcagctaatttacacatggtatttccaaagcattctgaccatgtgattctgtcattgttgcatataattctgccggtagatggttcaaaacaaccaacgccatggaacagctctggttggttttcagcaggtaaatatccctttcctttctttgtatgaacatgtataaacactggttcttcaactgttttagaatgttgcagaatagtaaataactcttcaaagttatgtccgtctacaggacccatgtatgtaaatcccatactttcaaatacgctgtccccatttattactattttttttaagtcgcttttaaattttgttaacccctttttagttggtgttcctacaacaggtatattatctagtgctaatttaacatcttgcttaaatttaaggtatctatttgcatttcttaaacgctttaatgcttttgaaattccgcctacattttttgatatagacatatcattgtcgtttaaaataattattaagtttttggttgtatgaccggaataatttaatgcttcaaatgccattccgcctgtcatggctccatcgccaattactgcaattgtttttcctgaaatcccttttaactctttagctttagctattccgcttgcagctgatattgaagtagagctatgaccagtattaaaggtatcccttttatcctcagatgttttaggaaatccgcttataccgtcatattttcttagcatatcaaacttatttgccctgcctgttaaaatcttatgggtatagctttgatgacctacatcccatataatatcatcattttggtcaaggtcaaacactttgtgaagagcaatagtaagttcgacaactccaaggtttgaagataaatgacctcctgtttttgagactttttcaatcaaaaaagaccttatacttgaagccaatttttgaagctgttcaatattcattttttttaattcgccggtatttgaaatttcactaaacaaaatggttacttcctcttcttatattttaaaccaaataatataaattaatttaataaaattatctgaaattaacttatatcatttggctgtaaaatcttacatattataaacaaaacacaaataggtttacaagcttttatcttgtaaacctaatttgtgccaaacaacttaggtatggtttatagcggagaaggtctgttaatcaaatgaagaacatttccgtcaggatcctcaaaaaacattgttccaattcctttaggattaacagcagcttctgtcagaaccttaacgccggcatccataagtttttttaccattccatcaaaatcggagacagaaattgcaatatgtctgataccggttgctttcatatcctgttttccgccgtcaatatcagttttacaaaattcaatcatgccaccgtcatctgcttttaagaaaaatgttcctttgccattgtcataaacaaccttccagccgaacatgtcaatataccaatccttaagtgcggcagtgtcatttgaaaatattcccacgtgctcaattcctaccatttttattacctcctgaataaattttgaatattatttatatcttttttgcagctcaataaatatatcatcccaagttaagccctgctcaaccaaaacaacagacagatgataaagtaaatctgctgtttcatattgaacttctgattttacataattttttgaagctatgataacttctgcagcttcttctcctacttttttcagcattttgtctatgcccttttcaaataggtaatttgtatatgaaccttcttttggatttttcacacggtcaacaattacgttataaacatcatataaaattccaggtctcgctgctagtccggtaggaatttctataagctttccattctcaaccttacggaaaaaacaagagtgattgttagtatgacaagcattgccggtttgattaacctttaatactatagcgtctcgatcacaatcaacatacatatcaaccacattctgaatattgccgctagtagcgcctttttcccacagctcttgacggcttctgctaaaatacacagcatgtcctgtttcaattgtctgtttaatactctcttcgttcatgtatgcaagcatcaatatctcaccgcttaccgcatcttgtgcaacggcaggtatcaaacctttttcatcgaacttcaaatcctttacaaattccattattaacatcttcctttcaaaatagcttcttttaaatcaatatttccggtatatagcgccttgcctattatagcgccttctacgcctaaagcagcaagttttttcacatcatttaaagtagttacacctccggaagctattatgtttacattaacattttcaagcatttctgccatagcctctatattaggaccatttaacataccatcagttgctatatcagtataaattatatatctaactccgatactttccattaactttgcaaactcaacagcaggcgtattgctgacatcttcccaaccactgattgctaccataccgtttttagcatctattccgacagcaattttatcctcgtattttttgacagccaatttgacaaaatcgggatttttaagagctgaagttcccaagataactctcgcaatcccagcgtttaaatacttatccacacattccatactgcggattcctccgccaacttcaaccggtatattaagttcagatactatagttcttatgagttcaaaatttggcatatcacctgattttgcaccatccaaatcaacgatatgaagaaattcaccgcctgcttcttcccacttttttgcaacctcaaccggattttgtgaataagttgtcttttgagaataatcgcctttaacgagtctgacacattctccacctattatgtctattgcggggtaaatcttcaacagtttatttctcccttcatcttttgaataatatcaacaattttatcgcgttttaacttcatgctaactcggtttaccacaagtctggcgcttaaatcacaaatttcttccaaaacatcaagcccattttcctttaaagttttaccgctttcgactatatctacaatgacatctgaaagtccaactaacggacctaactcaactgagccatttaactttataatatcaacggtctgccctttaactttatggaaatattctctggcaattctaggatatttgcttgcaacacgcataatgttttgtttatcaatcctgtctttcatttctttaggaccggctactgccattttgcattttccaaaacctaagtctaaaacttcatacagatttttattgttttctaaaagcgtatccttacctacaatacctatatccgcggcaccgtattcaacataagtcggtacgtcggaagcttttaccagtataaattttaacttattttcttcatcagtaaaaattaattttcttgttttttctttaatttgatttacatcaaatcctattttttcaaatatatctacagataattccgccaatctgcctttagcaagagccacggtaacgtattcgctgctgcttatttccttgtcactgtcattattttcatcatatattgaagccatgacgcgctctacgcctatagctatacccgtagcaggaatgtctcttccaaatttcgccagcaaattatcatatcttcctccgctgcaaattggaaatcctacgccatatgtaaatccacgtataataattccggtataatagtctatattttgaaccattcccaaatcaattgaaacatatttgtccaaatctttttcaactagaattgaataaacatccttcaagttttttaacgcgtctttggaacgttggtttaagtcattatcacaaagagccttatcaacaatttcaattccgccaaacattgttgctaggttctgaaacattgatttcatattgctgttaatatttaaattgtcaagaacagactgaacagcaataaaatctttgtcatttatatgactgcgtattaaatcgctttcgctgtcactcaagccggcttgttcaaccaaacctttaaaaaattcaacctgacccaaatcaatttgaaaatttttaattccggattttaaaaatgtttctattgcaatttgaattatttcagcatcagcatttacactgttgtcaccaattagttcaactccgacttgtgtgaattcacgctggcgtgcttgactgaaattttcctcatttctgaaagcgcttccacagtaagaaatacgaagcggcaatttaccagcagccggcttagttgccgccatacgcgctacagaggtagttaaatcggggcgaagagcaagcattcttccatcattgtcaaaaaacttaaacatatgttccgcctgagtcggggtagtaacattatacacatcgaaatattcaaaagtcggaatttgaaccattcgataaccataatctttaaaaactgtacaagctgtattttctatacgcagtttaagttcatactcatcacataatacatcggcaagtcctaccggagtatgcgtaatctttccaaaactcaaaattatcacatccataaagttatatattcaattcatataaaaaacattataccacttttaccaactataagtcaatatattttgtcttaatttgttatacattatataaataaaaaccggacgcactttattataaagtacgtccggtaaattatacagaaacattaaactgcttcaaatccaatatcgtctattacatttttaaaaatgctttcttctgttttggcctcatcatattcaactgtcgccatttcgttttcaaggctgacatcaacactttttacgccttctaaagctgaaagggctttttgtatagaagcaacgcaatggttgcagctcatacctttaattttaatctctgaagttttcatattaacacctctatatttttattttatctttattcttttcaaaagtaatgaattagtcacaaccgaaacactgctgagagccatagctgcacctgcaattgccgggttgagaaatccaaaggctgcgaatggaattcctattccattatatataaaggcccaaaatagattttgtcttatctttttcatagtcattttagaaagataaattccgtcacaaactgcatttgggtctcctctcaataaagttatatctgcagcttcaatagcaacgtctgtcccatcgcccatcgctatacctatatcagcactgactaatgcaggcgcatcattaattccatcgccaaccatggccacaacattatcttttgacttaaaagacaatattttttctgatttttcatgaggcaacacgttagcaaacactttttttatacctaccgacttagcaattgctgcagcagtcgcatcattgtcacctgtcagcatacaaacatcaatatccattctgctcaatctgttaactgcttgaacagatgtttccttaactgtgtcagaaagggctacggctccaataaaattcgtgttttcggatacaaacattacagtcttaccttgcatttcaaattcggacgctttttttaaatctatattgcttatctcaatattagctgaattcattagttttctatttccgattctatatacatttccttccgtatcttttccctctatacccattcctacttttgcttcagtttcctcaagctccagcaaaccattaacatttttaacacaatgtgtataaatagccttaccaagcggatgctcacttccaaactccaatccgccgattattttcaaaaatgtttctttatcttcctgattagctaatattaagtcggtgacatcaggcgttcctttagttatagtaccggtcttgtcaaatacaactgtgtttatttttgaggatatttctaatatttcaccgctttttacaagtattccgtgattagcacagagccccgtaccaaccataattgctgttggggttgcaagtccaagagaacatggacatgcaataaccaaaactgatactgcgtttatcaaagaagtttcaaagtttttagtaataaaataccaagcaaaaagagttatcagagctattatcataatagccggaacaaaaacagctgaaaccttatcagctatcttttgtattggagctttcttgccctgggcatttctaacatatgtgattatatttgataacgttgtttccttaccaattttttcagcttctacttgtataacgcccattttattaattgtagcacaaaatacattgtctccaatttttttgtcaacaggaagactttcgcccgtaagcatagattcatctactgttgaccgtccgctttttataacaccatcaattggtattttttcgcccggattgataacaactatatctccggcattcaacatagagagcggtactgtagttataactccgtcacgaagaagatttgcattttgcggctgtagttttatcagcgactgtatagcttcgcttgttttaactcttgctcttaattccaaatattttcccagcaatattaaagtaataatagtcatggacgattcaaaataaagaccatccatctgtccatgtactatattacctgctattacattatataaactgaaaaaatatgcagacagcgttccaatagaaacaagaacgtccatattagggctttttgattttatagcataaaacgctggtttataaaatctataacctattataaactgcaccggtgtagctaagattaattgaaaaatcggatcgtgaagaaacattatatgaattccaagccacgaggcaatcattcccaaaatcagaggggcggttaatattatagaaaatataagatatatttttagatttctaaactctctttgattggaattttcttttgattcgtcgtaaacctcagctccaaaacccatttttttaattttatctattatttcatcatttgttataagagtttggtcaaaacttacagttgccgtttcagttgttaaattaacattgatttcttcaataccgttcgtttttgctaaaacacgttctattcttccgctgcatgcagcacaggtcatcccgtcaatttttagctcagacctcataacaacagctcctttcaataattggaacatttgtaaaaaaagttagcaattcctaactcgtaataatcatagcatatttattttataatgtcaataaaaataaggatgagaattactcatccttattatataaatctaatagaataatatactacgcttcattattaaaactttgcagattttttatacaagcataaatttcagggtatttcttcaaaagatttagtggtttaaattgtctgtcagtgaaaccatgagtggtatatcctgtggctaataattcaccgtcatctctaataacgttatattcaaaaacgcattttgcaacgcccaatttttttaaattaacctcaatccaaacatcatcctgatacttagcacccttaataaacttacaatagcagtcaagcaaaggaagcaaaacgccgttttcttcaacttctttgtatgacaaacctgaagttttaaagaattcagtgcggccgacttcaaaccaaggaaaatatctagagtgatgcactactcccatactgtcaacttcacagtatcgaaccgtaatttttgttttaaacaattttatctctccttatactatctttgctataccggagtaaacttgtcctcttattccgtctattgtaaccgtggtaccgtttttcagaatctttgtcgcatttttaacacctaccaaaacaggaatatccaaggtcattccaacaatggcggcatgtgacgtgcttccggaaacttctgttataatcgctgaggctttttttaatatagaaattatagaattagatgtctcaggtattaccaatatatcgccgtcttcaaaatattttaaagcctcattgttattggaagcaacacaaacttttccgcttattgatttatttgaaagactttgtcctgacgctagtatatccccaaccaacagaacttttaaaatgttggtagttccgcttatacctaacggcgaacctccggtgagaacaactacatcacccttcttaaccagtttagtttctcttactgcacaattcacagcatgttcaaaaagctcatcgcttgtgctcttaacttctgtcataataggagtgacgccccatgacaaattcagctgacgccatatttttttatttaaagcacctgcaataatagggcatttaggacgataagcagaaatctgacgcggagtatatccggactgagtgacagttatgattgcagctgcgccaatatcatgtgcagtcgtacatgacgagtggcttatcgcatttgaaacactggttgtttgatttaaatgcaaattttcaaacctcttaacataatctatattctcttctgttttaatacagattcttgccatagtttgaagagccaaaaccggatattcaccgacagccgtttcgcccgaaagcataacggcggaagttccgtcataaaccgcatttgccacatcagaaatttcagcacgggttggtctcggattatgtgttatactttcaagcatctgtgtcgcagttataacctttttaccctctgtataacattgttttatcagctttttctgaatggcagggagttcgtcaaaggatatttcaactcccatatctcctcttgctaccattattccttcgctgacttttaatattgattcaatgttgtcaacaccctgcctgttttctatctttgaaatgatttgaatattttctccgccgttttgttccaatatcctttttatgtcaagaacatcaaaagctgaacggacaaatgatgctgctataaaatcaaaatcctgttcaattccaaatttaatatcttcaacatcttttttgctcatatattccattccaagctcaattcccggaacatttatacttttatgattgctgacaggaccgccgtttaaaacctcacatactacgtcagaacctttgatgccggtaaccttcatttcaattaatccatcgtcaatcaaaattttggcgcctgcatatacatcttttgccaaatccttatatgtgattgatgaacgagtgttatcgccaactatatttttaggagtaagagtaaagctctgtccttcaacgagttcaacttttccattttcaaaatctccggttctcacttcagggcctttagtgtcaagtaaaagggctattggaaggccgagttcatcacgcattttcttcactgcatttatacgaaccaaatgttcctcatgagtaccatgagaaaaatttatcctggcgcaattcatcccattcagcataagctgctttaaaacttctggctcatctgtggctggaccaagtgtacatattattttagtttttcttctcattgattatttctcctcacctatgtttattactcccatttttgtatataattttgatttacctctaatttttattgcagaagtattctctgtaaactgagcaatataaacctcacctttatctaatttttcagtatggtgaaaccgtgtatcttttcctctggttaaaccaataatagttactccgtcttcctctgcaacgattgtgacatattcaccaaaagtgtttacatccatatataaacctccagattttatattgctattaaaaacaacatatatatttacttaaggcattatataccaaagcgataaaaaaatcaagcaaaattagtttaaatataaaatattaagcgcaaaattaaagagatttaattaattaaagtcaagatatgtatctggaacatcgccaactatgactgattctgcaatgggtacttctgtaactatgtcttcaaggtctcctcttacaggcaaaacaacacccagtgctgttgtaacttttacttttattaaatgttttgtttgattaattccagcggaaataaattcattacaaaactcaacctttacattctcatttgttaaaacacgcaatgatacaggtattccgtacccggaatagaacttactcgaaaacatagaaagtattggaattgatatatcgacgctgtttattttatcaattctattctgaacatttacagcaagttcagattttaaaaggtttatctccctgtaattggtttcaagactttttacatttccgctgctgtcttttgtcatatttattattgaatcatagttaatatttgattcatttattaattcgctgacagctgaattacattcttttgtaacttcactgtttaatactgataatgacaaatctttaattactggatcaatatggttttcaattgaattaaataaaaatacacatgaaactatgactaaaattaggataatataaaatttaatttttgaagatgattttctattatagtatgttctgtgacgtttacacctttttcctgataatccgagcctatactttaactttttttgccaaataaacataagaatcacctattgtatgttacgctatactctaatttttgttacaattataaatttatttataaataaggtaaatttaacgtgacaatgatggtttagtatagtataataaacaaaagattaaatttgtatattattttgatgaaagtgaggaatagttatgtggtatgacgaaagtgtattttatcaaatctatcctttgggattttgtgacgctccaacagaaaacgatggaatatataaaaatagaataaaaaaagttgtggattggataccgcacataaaaaaggttggatgtaatgcggtttatttttcgcctatttttgattctgataatcatggttatgacacaagagattataaaaatattgactgcagacttggtaataacaaagactttaagatggtagctcagaatttgcatgaaaacggcataaaagtggttttagacggtgtttttaaccacgtaggacgcggcttttgggcttttaaagacgttatagagaaaaagtgggattcacaatataaagattggttttatataaattttgacggtaacagtaattataatgacggattttggtatgaaggctgggaaggacattatgagctggttaaattaaatttgagaaaccaagaagttgtaaattatatactggaatgcgtagatttttgggtaaatgaattcgatatagacggacttagacttgatgtagcttattgtttggatcaagattttttaaaaactttaagatatcattgtaatcaaattaaagaagattttgttttaatcggagaattactgcatggggattacaatctattcgtttcagatgacaaacttcacagctgcacaaattatgaatgctacaagggactatattcgagctttaattctgagaatatgttcgaaataatccattcgctaattagacagtttggaccggaaaattggtcgctttataaagataaacatcttttaaattttgttgataatcatgatgttactagaattgctgatttgcttaatgtttcagaacatttaccccttatatatgggttattatttagtatgcccggagttccatgtatttactacggaagtgaatggggcgcaaaaggaaagaaagaaaatggagacaacgcactgcgtcaaagctttgaagctcctattgaaaatgaacttacagagttaatttcaaaattatcaaaggcacatatggaatcaaaagcgctctgttatggaagttttgaatctgttctgctaacaaataaacaagcaatttttcagagaaaatttgaagatgaacgtgtgcttgtcgcaataaatattgatgattcatctttcaccgcacactttgacgctcaatgtggaatggctatcgatttaattactgacgaagtacacgacttcggcggcggaagtgatcttcctccatacagcgtgcagtattggaaaatggaaagataatttatatttttataaattttaaatattatatgttttaaaaattcatatatataaatttcaataaaaactgacatcagataaattatatgcactccaaaatgaactatattgattactaacaatgacagaatattattaaaaggagaaatttataactattataatattatagcatatatttttgattacaagattaaaattgataattaaatatgccaaacaggcttcttgtaacttttctaagaagcctgtttctacttgtttaaaaatatataatctatttccccactgaatcttcaggtatgtatccagctttaataatttcttctacaaataaatttaagtctattccgccatttataattatattaattaaactcttaaatgacggtagtcttttcccattttctaaatctatgtattgacgcggggagagacaacatgtttctgccattttctcttgatttaatttcagttccattcttctaaagtataatgtctttccaaagtataattttaatatattcatcatttcactcctaatatacaaaatgtgtaaaatctatcaatttttattccaagctatatgtttaattgctgcatatgaactttacttgctcatactttttataaagtatgagtaataattgcataataaattttataattaaataaaaaaaacgcggctttaaatgccgcgcctgtcggtgcaaatatagttgttatcggttcaggtataatctccagcgtttttcaatttttttataaactcaccggggtctatatcacaaataattaatatgtttataaaagttggggttgacggtatacttacagcgttttctaaatttacatatgatctgcatgtaatatggcacttatgagccatagcctcctgagtaagtttatattcctttcttttagatagtaagatttcgctcaatacagtttttataatctgttgattgtttttatttatcacaaaaaacacctctcttcaatatattacagatggattgtatcagaattttatatattttgaaacgaagtgtaattcatgaaatgcgaatcccaaaatctttttaaatttttttatatcaaaccttactcagtatagagtaaagatatattaataagttttaggatatttatctaacaataatatttttctttataatgtataagtttaaagattaattatattatcattatatataaacctattaattaatcttctaatttcttatttctaaataatactctgaagtattgatatgttggtcaaaaaaatttgcagttattaggctatagtaacattttctttattgaaaatgtcatagcaaaaatataaaagggtatgttttcacacccttttaataatctaatatagagcacaattttttatatcaaaaattctgttgaatatatatacaccaaaaagatatatattatattaagtttatgatacatatgctgcagcagcaatatcgatgtattataagtaaaatatttgtttatttttatataaataaatacccagttgtcaataatagaaatatttatactcattatctgtatgatgtattttataattataaagtaattatattataatttgcatttaggattactaaattttgtggaaactcccgcatgagattccagtatccaattcctgataaattgtaacgttcggcaagctggagtttggcggtaatacttcttggatcttcaaaccaaacttcatgaagccgcccttcattatctgtgtatctgaaccacggtgattgcgcaacagtatcaaattgtatttctgcattatttgcttccgctatcctaatacattctaccggtgataaagacgttgcttttgttactccttgttcaaatggcaagggccagtcataaccataagtcggaacgcctaaaagtatttttgaagaagatatacgggtcagagcatactccaccacttcattaactttatttattggagccacagccattggcggtccatatgtatatccccactcataagtcataagtaacactttatccacagatgaggcaatagcgccataatcatgaccttcatataaagttccttgctgtgtgtcgctaacttttggagcaagcgctgaaaatagcgggtatccaagaggatttatagctttgtacatattttggagaaatataacataatcatatctatcttccgggtatataaattcaaaatctatatcaagaccgtcatatccttttcgttccatgttaccaatagtctcattgattaatttactttgtatatttccatttgtgaagacaagatttgctctttcattgctgaagtttccagcttcagttaatgttgaaaggtgcattaaatttttggttccaaagctgtttgccatagcaatcatccactcatcgttttctaaattaaccaatccgccgtcttctcttatcccataagtaaatggagtagagtatgtcatataaggcagctgttctcgaagaagttcgcgatttatgaacggataagcatatccgttggttataaatgatgttgttctgttttcatcttgatatttaattactaatgtttgacccggtgaaatgtttgtactgccttttaagaaataattgtttcttaataaagttttaatgctgacattatatctgttcgcaatacctgtcagagtatctccctgctgaactatatattgcgtttcaggttgcagtataaccaatgcttgaccgataacagcccttgagttggtgtttaaaccattatcagctaaaaaattatttaaatttacattgtattcattagcgataccggttagtgtttctcctggtttgacgacatgaataatcatatttatacctccgtgatttatatttatttgtttacattaaaattaattgttaaactactaattaaaaatatgtcatgaatttctgtctattatatttttaaaagtatatagcacatttcacataaacaatatattggtcataaaaaatataacagatatttattttttaatatataattaataagtgtacacagattaaaccaacaaatggcagataattaacatgaatgtaaatcttactacgacatatcaattacaatatataaattgtgattaaaaaataataaatgtttctaataaatattattatgaatttatctgcacttatcttcaaaccattaattccattgacaaaattattttatcaaaaaatttttatataaaaaaattctaagttttataattcacgcatcagatggaaagactgcattagatttaaggttccgtatccccattgttcattgggataatccattgcaatgctttttacacatccgcgtatcaagtaagcccgtatttgataggtgcttaatgatacatcgtttccatttacaattccccattgcattaaaagtgcgcatgcaccactggttattgctgcagcagcacttgtgccgctcatttggccaaatccatacggaaagtacccgcctatattaacgccgggagctactaaatccggaagagttacctctgcccttgatggaccccaagaggatttttgataaaggctttggcttaaactattataagctccacagcatatagtgccaattgctgtccctggaatagttgtggtgtaatatggtgaagcagacaggaattctacatctggagacacaaatcctgacattggaagccatgagtgataaacaccattaagaataatgtcaccatgaacgataatggtccatattccgggagtagcatctaatattcgcacaactgttaactgaccgccgctgccctccagcggcatataatattctacagttactctggtattctcaagaacaagctttacctctgtgcttgtgcccgcttttgccggtacacgtccaactaattctccggatggtgaccgaattgatacagaaagcctatcggatacagtattccaaagcgaaatacatatgttaccggcgttgctgccgactcttacatcaacattctgagtttcaccaactgtgtttagttttcctgatgtatgatggcgctcctgacattcatttccggctgcattacaaatacaaactccttttaaattagatataccgcttaaatattcttcaaatatactgaaaccatcgtgacttccaaagtttgtacctagaccaagacaaattactaccggccttttcaattcatgagccttttttataatatattcaatacctaccattactgcacttgattcaaaagcgtattcctgttggtctggaacgcaaaatttttcaagataaaatggccgggctttttttaatttaacggcaattatatcagcctcaggcgctgctcctgaaaaattatctatttctcttcctgcagctaccgaggccaaaaaggttccgtggcctgatttatcatgttcaggaactatatcatgaggattttcagaagataatgcggagttaatttgttcattattgtattcatgtccgaaaaagaaaccgtcaggaggatctccttcagctgtttgatcatatataaattgaattttacttgttccgtcttcataaataaagctttcttgcatataatcaatacctgtgtctacgataccaactaaaacacctctgccttttaagtcaagatacggttggttatgaactggtataattccggctgaatcaagtggaggacggtccagtgttcccaatattacgggtgcagaacttataaacgatgtgcttaaataagaaagcaaatcatcatagtgacttttatctatataaccgataatatatcttccggatagagtctgtgtaattgttatattaggattttcttttataaattcatcaagataatcggaacttctgactataaaatcaagagtgtcgggcgattgtataaaatttttgatctcatttgaaagttccatattaaattctccttttatatagttccaaatcatcgatggtgtcacaaagacttagctttccatatccccaaagagtattgggataggttaaatatgtatttcggactgcatttttgcataggaaagctttaacacgctgtccgtaaagaaaaggatcattcccttttacaattccccattccatcataagagctgctgctccggaaacaaatggggcagccatgctggttcccgtatatgtatcaaaaccaccgccggattttgctgtatagatgttttcggcaggagctgtcaaatccaattgaggcagtccaatttcatgtattgtgccgcctcttcctgaaaaggtgcaaacagtgtcagtttcgggtctataaccgccaacagaaattggagtaaccgcagtggccggtaatgtcatcgtcatgtctggagtagattcaagaaatgaagtacgttcagacacttcatcaattgtagggagccaaacgtcaaaattaccgtctactattttttcaccgtaacatattagagtccaaataccgtccattaggtctgatgatgcttctaaattaacgtaaatttcctgagctgcactataatggtttggttcaccaaaagaaaaagatattttaacattgtgtaagtttaaactaatatctcgaaccaattgtgtaattatgcctgtagacatcccgctgggattaactaattcaaaattaacaatatcggaaaaatttttccaaagtgataagtaaacattatttttattagaggaaacgttaaagttcaaatttagtggattattttctttaatatttcctttaaaatggtggccgctatatccttcgtttccggaagcacatacaattactgttttccaaagtcttgatatgtcatcaatataagtttcaaataaagattggcctctatgagaaccattattcgtaccataacttaagttgattacgcagggcatgttataattaattgctttatcaataatatattttatacctctcattatgtcggttgtgcgagtttctgaactaccaagctttactgctataattgatgcttccggagctgctccgctgattcctgcagcaataccggcaactgcagttccgtgtcctataaaatctttgcatacaaatttatctgcattaatatcagaaaatgtatattctgttcccttataaaaaccattaggtgggactccttcagttgtcatgtcccatacagataaaattcttgttgtttctgcagtgttcataaattcggagtggctgctatcaataccggaatctataattccaattataactctagaaccggtcaaatggtaacttgtttgattttggaccggagatatacatgttgagttgagaccgagtttagttgataaaaatagtttttttgttggttcccaatattcaatttcttttaattctctcagatatttgatttgagatggttctatatcaataattgcataaccggcgcttaatatttcaattttatctcttatagaatcaaggttgccattatattttataatatattccatatgaacacagccttaaaatatatttttgctcacgtaccaacgagctgtacatatattattatgagaaaggatgtgatattatgagaacagattatatagataaaggaattctgcaggtatcggtctctacagagaaatttgtaataccaacagataatgctttggttcgtattactgatcctcttgacggttctgtaatagaggaagttaaaacagacagtttaggtcagacgcccgctgttgaattgcctgcaccgccgcttgaatattcggttaacggtggagatgaaagaccatatgcattatataatgtaactgtttcagcagcagatacagaggttcttcatattgatggagtacaaattttacctactagttcagcgatacaaaatgcagttttaagaccagccgttccgggaggcttcaatgttcgcaatacgttgattacctctcattctctttggacgaattatccggcaaaaatacctgaaaatgaagtgaagccaatagataattcaagtgggtttgtagtactgcctgaaccggttatacctgagtacattgttgttcatcttggtaatcccgatgacatatctgccggtgacgttgaggttccgtttaaagagtacataaaaaatgtagcaagttgtgaaatttattctacctggaagactgaaacaataaaagcaaatatacttgcaattttatcatttactttaaaccgtgtttatacagaatggtacagaggaaagggacatgattttactgtcacaaactctacagcatatgatcaggcatttaattacggaagaaatatatttaaagaaatctctgtagcagtagatgaattattcacgaattatataaccagagaaaatattgaacagccattgtttacacagtattgcgacggcaaatatacacagtgcggcggcttgtcacaatggggttctcaggcacttggggagcagggatatgatgctttaagtatattaaaaacttattatggttcagatatatatattgaatcagctgaaaaagttgaggggattccatcatcatatccaggagaacctctgcaaataggaagcttgggagaagcagtaagaactgttcaaactcaattaaataaaatttcgaataattacccgttaattgctaaactgagagtagatggaagttatggtgaatcaacagcgaacagtgtaaaaacatttcaaaaaattttttatcttccggaaacaggagttgtagatttttcaacatggtatcaaatttctaatatatacgtagctatttcaaaaatggcttcataaattagttttatataaaatagcattgtataaaatatttttgctgggtgacaaactaaaaatatcatagttgacattataaaatggttatagtagaatataagaaaaaatttataggacgtgatatatatggataaaaaattgttggaatatatctccgaaaaatcacaagagctaataaattcttcaacatgcagtaatggggcaaaatcagcagcagaatcctggctgaaagccgttggcacagaaaacgaagcttctgagacaaagaattattttgctgaattggaatcagatattatgcctattgatagtttaattaattttgcagaatcagataacggagtaaattgttttggagcagacgccgcaaaaagcatagcaaaacatgcaagggaaattaaatcatcaggggcaaaatactgcgattgtccggcttgtgctgcagcagaggcaattttacaaaaaaagaatgatattcttaaataatagaacactgttgaccgattataataaaatattccgccgctcagtttatttgagcggcggaataaatatttattcagttgttattattgcagtatcaagttgattcatctctatttacatttagccaacttattgtttttttccttttccgtgtatctctatatcccatatattttggtagtgtccttcgtcagtatcttccggctgtggtgggtctattactactctgtctaattcttctatccagtcaactctacagtcaaacgcttccgatactgctctcagaggtactactgttctatctcctactaactttggcgctacatccagtgtaaatacttctgttccattacccatttcaggattgtcaatttgcattactactgttctttcaccgttattggctgttataactccatctccatcgtcatacgttacttccgcacccagttgttcaaatattgctcttaccggaaccagcaatctatcatcttcctctattggctgctgatcaaattccacttgttttccgttacagaaaattgctgtattttcttgtccttttccgtccaatatatatgggtcttcttccgttccgcttccggatttgattatcatattatcctcatttaaataaaatgctggccgaactcctaattcctcatatcctgaaggtgtcgcatcatatatgtcttcatttaatgagtacgattctcctgcaaatgtaacagctgttccaaaaacgggtgtccttaaccaataatatccatttggtgatttccctattggattatctataccataccatgggtctaaaactccttctgcattttgggcagcaacagttccagactgagaccaaagttcatatagttgactttcatcaagtgtaaacattgtatcacttattctatacattgatccataatatgctgtttttaattcggatatcttatatacatacattgtttgttctaaatgagtatttggcgctctcacaattatcgggtaaaatgggacatttaacccgtttgtagataatctttttttattttcggatagagcctgccagtgacttactgttttaatcgctgacttttcagattctgtaaaatttttagctgataaaaaacctgcctcatcagaatatggatttaaccctgtcgaaccacgataacgatgaactttgtcaatggtaggaattttataaggccatataatatttccggctaattccgaagaattaagccatgtccgcaaagttgcctcttcccaaaaatttgtaccataataatactcctcaccaaaacctgattctttataagccggatcaaaatttttatagcacagaattttatcacttaccattaaaataccattttcattatcatagaccactgctttccaaagtattggattatcattatattttcctaattgaaagtatgtaccagacactatagataaattgttttcatccgcaattactgtcattcccgtaattaatgtaaataacattattaataataaagcattacatagtattttttttaattcacgagatattttcatcttaatattcctcctcatttccatcctaaatattctttacattcttgtgtaaatgttgcttctccatataataaaccacatgtcatatcataaatgagtctgttataatcctcaatataatatgcgtttggaactgattttttaatttcatcataaaaccaagaatatggtttattactaccaggatcatcataatttcctgttgattctgcttctgtgttagccaaataagatggatgatttacaaaataatgcctgttattattttttgcaatttcagttccatcattgtagtaaagaccagaataattctgttcatttggtccgcctgcgtatattgcaaaagatttattagtgtcatttattaaatctttgtatttattatatgtaatcgtaaaattgtctgcttttcgaatagattcgacaggaatctttccatgtatacgccctgttaccaatgaaatgtcatattccatttcaaatgaaattattgtatttgtaattttttgatcatatggcacaccatacatataaaactgattatttgccgcactaagatacaaatcctttacctttctaagctggtcattataatacccattgtccggttcaagttctacattataactttcaacttcactttctccacctcgtataataaagtagtagttaatattgttcgattttaagggcatgtgctataatgttattagatactgtggattagttacacccacctaccacttgatggtttcttgaaggctctaaccacagtctctttatacatttgttaattagttagataccgcacgacggtttatttagaacgaggttacaatcgtaaagagtatctgtggaacagtatcaaatattttttcaaaggagtttttagtatgatttttgttggtatcgatgttgcaaaggacaagcacgactgcttcatttgcaattctgacggcgaggttttatttaatgcttttactattcagaacactatagaaggttttaattttctttatcaaagaattgaatctgtttcaaaagattttaacaaagtaaaagtagggcttgaagccacaggacattactcatacaatcttttgggttatcttcttgataaaggtttgactacctttgttatcaatccattacataccaatctcttcagaaagtctctcagcctcagaaagactaaaacggataaaattgatgcccatacaatcgctatgatgttaatgtctaatgtagacttaaagtcctactcagatatattatatcacaacgaagaattaaagtcactaaccagatacagattttataaagtttctgaaagagcaaaactcaaaaccactgtttcccggcttgtgaacatacttttcccggaacttgaaaaacttgttccttcgctgcatataaaatctgtctatactatgctttcagagttcccgtcagcccatcatattgcagaagcccacttaacgaagcttacaaacctgctgcatactgcatctagaggcagatatggcaaagatactgcaattggttttagggaagccgcaaaaaactcaatcggttcagacatgccagcaaaatctcttgagctaaagcataccataaagctaatacaagaacttacagcagaaattgaggagatagaagcagaaatcaagcatattatggataacataaacacgcctattctgtctatcccgggtatcagttacacaatgggagctatgatagtagcagaaataggtgatttcagtaagttttcatctcctgataaaatacttgcgtattcaggaatgtcaccatcaacgtatcagtcaggacaaataaccaatagctattcacacatggagaaacgaggttcgcgttaccttcggtacgcattatacaatgcagcaaaatatgtatgtcattgggatgaaaccttcaagaattatctggcaaaaaagcgaactgagggaaaacattacaatgttgcaatatctcatgcagtaaaaaaactagtgagagtaatctatcatttacagaaaacgggtcagagttaccaagccgtttgagtttatgtaatactgtatttttaatactatttttttaagcaatttactattgctttatttgacatacaattttctagtttccttatttgaccgaaaagattttaactttttttatttttctattgacttttaatagttagtcttcataatatgaataaaacaagcccggctgcatcataactatatcgaataaatcttcgtttgtatttagtgttttacctgtattagcagcttccgctatgtttgtccattcagtttcattagtgctgtatggaatccaaaacaggcttttattctttctatgtataaactctgatatctgagaacggtttttatatgcaaacgttggatttccattagcgtctttcatgctatcagggtcttctcttccaaaatataatcctgttatattgccttcaccaaatcgacttgcaatattgttatatattgtattcgttacatacatatatttatcaagcaaatcttgttctgttgttttttccggatttgttgaaaactccacttcatcatttattcccgtatgcgcaagatgcggtgtgcctatatataattctggcatttgaattttatcgcttcttcctgaatttgctgaagtcaatccgcttttcatattacttataatatttgcaactctatccgttgtttttgatattacactatttatccaatcgtctgttatgtcttgattatttttatggataaacttattataccctattgtatcctggtcaaaatccacgtcacggattgaaattacaaatccaacctttttatttcctatcatatcaaaatagtttttaaagaattcaggagtatattgatattcactgcctttatcattcatgtaacgacttgatatagtaaggttataatcttggtttggttccatctcagaatcataaagcataatatatacagtcttttcaccgtcctttacaactcttacatttttcaaaccttcatccagcgtaaataagcagctcattattgatttacacatctcggctcttgtgattgtatcttttggattaaagctatttccgtctcccaccattattttattgcagtataactgccttactgcctctaaataatactggtttattttccatttatcactcaatcccttattgctgttccaattactcatttggtcgcatgacatgttttcactatatgtatataacttgtttggtacttttgtatcttccactgctcccataaatactgactttattatatatgctgactcatctcttgggatttcactgtaaaaataactgtcgtcgattgctttccctgcatatatatcaatattttgcgtcatataccgtatatagtttctcgcccaatactctgcatttggatttgcattttctaattctacgtctgcgctttccagtaatattttaaataattccgctcttgtaaccgggtctattgcatttacttttccttggtcgtctcctcctattgctcctatatttgttgccttaaacaaataggggtagtaccatgtttctgttttttcttgcaaatcttcatacttctttaccttatatttttcatttgcattatatatatttggcactactccgtcaaactctgttctcactcctcttactatttctaaatcaggctccggcgttggtattacataccattcctgttcttcaacaacatttgttttaccccaacctgaatccaacttttgatatacttcaacatcattcttatcataaccatatggctttgtaaaccttatattatcatacagattttcgccttccgcaacatagtttactatatttgttttatttgctattgataacaaatatgaatatgtatcgataatattatatgttcctgatattgcagaactcgttccatttatacaataacttccctgactattttttgaggtgattatacttgctgtattatctttatacactactacagggaatctatactgcaggtttttatcaatgacttgctgaacatcatactttgataaatccgcattcttaatcgttatattattatcattcgtgtactgttctaacatttcctgataatattcagctattgcgtttgattgcttcacttcatgagcatttccttgcgtcaagttatatacatcatccggttcagtgaataagttatagcttttagtatttacctcgattttactagcgatagccggcaaacatccataaatatttaatacagaagcaattgacgcaccaaattggttggcagtaacattagcaaaatcatgttttcctgctctaaagtcactattatatatattactgttcgaaaaagcggacgttttattctccgaaaggctcataacctgtgatatgttattaaaggctccgtacagctctgatacatttagcctcagattcagctctgtttcacagtttattatttcttctctgcttccttcatatcctccgccgagtagcattacatatactgctattcctttattattcagttcttcaatcttttcttccaatgcggttttatctgttatttttcggacgaataaagttataactttgttcccatttatggatatactttcctctgcatttaacgcttcttcacatcgtgcaagcatagtttccgcgtctgttgttcccgaatagtccttggacatcattagtcccagtgaattctttgcgctttctgcgtcttttgcatatccatagtttgtatcgtccactaaaactatttctgttcctttatttgccgaatctttcagtccttcaactgaacttgcccatctctttgttgaaccctggtcaaacttcttttcctcttctgtatataccggcatacaacaaaagatactccgccgctcaaataaactgagcggcggaataaaaatttattcagttgttattattgcagtattagtagcttcgtcccactctacattatatcctaagttttcagataagaatctaagcggaaccattgttttgtcatttacaagtcttgccggtacatccattgttgcagtttcaccattcactgttgccgttgtatcatctatagaaaatgttacacttttctctttttcgctgctaaatgtacgcatttgagtattagtattaataggaactgttgctgttgctgtctgggtttcttcgttccagtttacattggctcccatctgttcaaacaaaaaacgcattggcactaatgtacggtcattttccattaccggcggctgtgaaaagcctaagatgctattatttaattttatatatggtgcatcttttatcaaatttaatttattttcaacttcctgtttcaatatttttaatctctcatctctattatatttttcaaaaataatataatcatcattttcataaacataaaaatttataaaatattgtttcatattatctaaaggtgtatttatttctataaaatatatgttatcataactcaataaattattgccataacttgtcgcttctgttcctatatctgtaacaaccttttttatatttgaagcaacaaatatatcaccgtacattgtatctaaaaacttatcaaatccatcttcatatataacatttacaaaattattacgtccttttatttttacagaattatttatatatgatacttttgaatttgtattcggtatacgattttctcctatatccttccaatcaataaaatcttctgacatcatagtatgtataataactttttttcctccccatgaatttgtttggttttctaaaacttgtctgtatttgcaataaaatttcttatcataataacatattttatatacatatccatcaaacgatttgctaacgattaaattataattattatcatatagtttaatattattctgcaaattaatttgtgacataaaatttatactcgcatcattttcacattcacgtgtgaaataataatcatctgcaaatacatattcctcattataaaaatgattttcgatttcctcattatattcaattggtatataataaggactattacatttactaatcacgtacgtttttttatctatatttgcaatataattattatcaaaaatagttttcaattctatattttcataagtacctgtacttttactttcaaagatagcatttatttcgtttttagctaacacgttaattggtaaaattaataataataatacaataatataagtacttaaatttattttttttaacatttctatatcctcctattttaccgtaacatttaatttatattaattatataaattaaatgttactccgccgctcagtttatttgagcggcggaataaatatctattcagttgttattattgcagtattagtagcctcgtcccactctacattatatcctaagttttcagataagaatctaagcggaaccattgttttgtcatttacaagtcttgccggaacatccatttcagctggatgtccgtttactgttacatttgtgttgtctatagaaaatgtcacacttttttctgcctcattgctgaatgtgcgtattctctgatcagcacttgtaggcagcgttgctgttgctgtctctgcagactcattccatgttacattggctcccatctgttcaaacaaaaaacgcattggcactagtgttcggtcattttccactactggcggttgtgagaatcctagaattttgtcattaagttgaacataaggggttctggacatttcatcaagtactcggtttatatctgaaagagatatttttattttattttcataagcagattcaagtataagtgaattctcaacaaaataccatctttgtattgttaccggattagaacccatttgtcgttgtacatttaatatttcatcagcattaattggtatttcataaacaccatctttagaaatgtaaaaatatcctccaccattctttataatatatggaaagttagatttcgacacacctctttttccagaatagttttcatgaacaatatctacaaatgtgtttccattgtcaaatgatatatcattatattttaaattccccctatatataatattttcgcaagtttctacatcattttcataatcataataacattcttcccaatttatcatgtcagttgatttacataacttatgacctttgtaacctggagatagagtgcaataaaatattccattattacacgaacaactaataatataactacccatcattgtttgagaaattaaattaaatttatcatcataaaaatatacataaaagttactccagcctttccaactatcaccaccggcaaatatagtagaatatggtgcaggatttttccataccatatatccagaatctatttttacataatcgtctgcatgcaattccttaataaaaaaattaaattcattttcattatatggtttagaaacagaagaattggctaaatcaatataatattgtactcccataaactcaaacatataataattacaacataaagaattctcgtagtaacgttcatataacttcactaatccattggtttgtgtatcattagattcaacaatataattaattcctaattgatttaaattaatttttgggtcatcatctactacatatgcgttatagttatcatagttatcagaataaacactgctacccaatatactgataataaaaattaatattataaatatttttgtaaatgtttttttcactattctcttctccttatttttgaattttatctaataaatttttatagtaaatatctgaatgctctgaaataatttcattattttcatctaatttatttatagtataatattttatatcaccgtcaataacaaaagcattatgtaatgttggattgcttcccgtcatcagtgtagtttcaatattaataatagctgtttctccagggcttatatcataattaaaacactctgttgataaccatacccaataaggaacattcttttctattaatccattaaccggtgttttaccaggaatagtgctattaattgaataattgacagtataacacattccttgtaggacatatgagaatttttttgtaacttctgatatatttgttatctttaatctatacttatgcgttacaccgaaaccattcattccttgaactacagctctagtcatattatcagttgaatttggatcaatggatgtatttttcccctgaaaagtttcgaaggcagtattatcttttcctacaatgctgtgcatccaattattatcgaacttttctcccggctttatatattctttttcactgtatgaaccaactttaaattcatcaggcagggctgtatctacggtttgtttggaatgttctgtatcaaatatccacttttcttcagaattgttcggtataactgtactttcaattgcaccgttttcagaatttcttatcactcctccatatggcaaagcaatacttatttctgaactttccggcgttgtatatctattattagtagtaaacggtgacatatttgttgtaaagaattgttgccttgacataccatttaattgatttttcacatatactggcaatagcatatcttttgtattttcatctattatgtattccattggtttcgcttctattacttgtgatgcatttccaatcccctttacggtttccaacgtttcataagaacatttactattaggtatattgtttatgaccgaattacgagtattttctatggtcgtattagattcttttttatatgcaacatctgcataactcacagtacaattttctactttaaactccatcattagccaaacaaatccgctgtcagcattataattaatgttataaagcttattctgaagctgtgacaacatttttactgaattttcttcatgcccttcaaataccgtcattgaaatattattttgaaaatcattccatgtatcatataagttgctccaagaaccttgtgaaatcatatgagacataccgagctttgtaatagtaacttttcctacctttccagcaaatgaattcatattaaaaaatgcactatcaaaatatacttgttcatcattgctaaatgccgctcccttagtatatttattagctgtagtattatttgctacatggtgatatgcaaagacggtatatgttccgggttctagtttttccgcttttgttaaagatgatgcctcaaaatctctgtcgtttaatatatcacatctaagaataaattcaggatgatcatcaaatatataatgatttttagtgccatccgaatttgttgcattttgattgaatatcacttcttgaggtgcatttacatatgttatttccaaacctactgtcgcattaccatttttggttaacacaaaatcatatacaccagctgtaactttataatacagattgttatcaccattcataacagattggcttatactttctccagtttctgcatttttaagttccccggttaaagttgttgctcctaaatctcctgtcgttcttattataaattttgtatttaaatttaaatcatctgtcaatgtgattttatattgtctcttgttatttaaaccaaattctattgcatcaattttatagccatctgtatttgcatttatttctgtgatattttcatcgccatctatatccgcccatatttcaggcacctctccatcaagatgaaatagtgacttcattattattttgcagatttgtgctctcgttagaactgaattaggttcaaatgttccattaggatttccatccattataccattcatatacatttgatatataccataattttctgtatcacttatttttcctacgtctgtcataacttttccatctgtccaaagagcgtttttcagacaacttatatttgtgtcaaactggtataataacgatggtactttattttcttcagcatgctcaatcattattccggtcattatatttgccgtttctcttctcgatacaccatcctcataaaaatactgatatgtgctttcgcttgaaatatctgtataatctaccattccaagctcaatagctttattaaagtagtttgttgcccaaaactttccttcacttacactatcgtcagacataattccggttgcacaaagaatggtcttaattaattgagctcttgttatctctccttcagcattaaatatcaacgtaccgtcagattgttgatcgccatttataattcccttatttgttgctgcaaacaaatacgtataataccattgatttgcacttctttcatcttgatattgtattaccttatatatttttgtagaattgtatatgttaggcacatttttagtaaaggttgtttttattccgcataaatatatttccccgtcatttaaacctgttattgttgctttattacccgaaacagttatatttgtatttgtattgcctgaaggatattttttaaagtttatatcttctttactatatccacttggtacattaaaccttattttatcataaaaggcacttgtataatcttgttcatctgttattgatgttttctgtgatatttcaatcaaatatgaatatgtatcaataactccatttatatcatttatttctaaagtaacaggctttgtgaaatcattattcttatatgctgtataagtattattattagtttttgtaataagatatgttttatcatctgcttgtactataacagggaatctgtattttaaattatgttttattacttcttcgataccgattgtagtataactagaaaagtcattataaaaattcgatattttgtttgtactctcttttgtaatttcagcagcattgccctgcatcaaattatatacatcatcaatagaaacatcaaacaaattatatttatttgtgaatgcaggaagacacccataaatattaagtattgacgctatatatcctccaaaataatttgattcggtcatatttgaaaaattatgtttaccaattctaaaatcacttgtatattcatctaatgcaactggtgatgcttttccattctctgaaaggctcataacctgtgatatgttattaaaggctccgtacagctctgagatatttagcctcagattcagctctgtttcacagtttattatttcttccctgcttccttcatatcctccgccgagtaacattacatatactgctattcctttattattcagttcttctatcttttcttccaatgcggtcttatctgttattttttggacgaataaagttatcactttgttcccatttgtggatatactttcctctgcatttaacgcttcctcgcatcgtgcaagcatagtttccgcatctgttgttcccgaatattccttggacatcattagtcccagtgaattctttgcgctttctgtgtcttttgcatatccatagtttgtatcgtccactaaaactatttctgttcctttgtttgccgaatctttcagtccttcaactaaacttgcccatctctttgttgaaccctggtcaaacttctgcatatcagctgaattatcaattcctattgccaatgtcaccgctgagcctgtctcctttatatccttacttatgtcttcctgggtaagctcattttccattgccaatgtcattatattttctgaatctgctgcttggacgcttgtctccgcagaaccgcttgtttgaataagaattgattttctgtcaatgtaacccaaactgtctcctatgccaacaataacttttatctgttttcccaatgcgtccgggtcaactgtaaactgtacgcttctataatcgtcgcatccgtcaacaggcaggaatgttccttgtcttgcattccagaaaaagaatggcgccgctttttcagaacatctatactggtcgtctcgtatggtaagttgatatattcccttgctttcatctataactgtcatagacgctgctgttatttcgggatatacgtccggggctgtttcaggatacatctggtcatattccatacctatagaacgtataggcacatcggtagacggttttatcgacgcgtcttgcagaaccgttaaatcaaatcttgccttctcgccgtcatcgtattgtcctattgccgccgttagtgttacatctgtatcttttccgtatgcgtccgggcggtgtacttctcctgtgctgcttatgtatccctcgtggctgcttgtccatgttattttgcttcctttgggtccctctgccggcagtgatatattttcggttatattgtttcctatattatcgctcatatattttctcagccagcgcatatcctctatctctattgagctgtacttctgcgcctcttctgaatataccggcatacagccgtctatattggaaccaaatgaatacatatatccatatcggctcagcgctatgctgtatccatttccgcatactatttctgttatttcttttcctgacagacttgtaacaactgccggtgactgttgtgttccggtcttatttaatccgagctgatagttagagccatttccccacgcgtacactgttccgtcattttttattgcaaagctctgcaagttttcagcaaatactgattttatatcgctaagccccggtacttttgcaggtatatttctgctcactttatctccatgccccaactgacctgatgcgtttctgccccagctgtatacgtttcctttgttggttaaagctatacaataattgacgctggtttttatatcgacaaatttttcgtatggctcatcaaagcttacctgaagtttttgaggagtgtttgcagaactatccggtccgtttccaagctgtccgtctgtcccttcaccccaagtatatacttcatttccggcaattgcagcaacaaagctgtctccggctgatacttttgtaaaattatttttatccgttatttgaaccgggacttttgaatctgtattattaccctgacataactgtcctaaattattggctcccatcccccaaagtgttccgtcgttttttaggaaaatactgaacccatctcctgctgtgatctgctttacatctgatatatctgatattttagtcggtactttatatttaccggccatgccgcccataggcttattagtattacttccaaatccccatacattgccctctgtatcaagcaccaaattaaaattctttcctcgctcaactgcctttgggataacgccgtctcctaaaactatctcatgaggcgcattgtgtttaacttccttatctgttccgtctccataatatcctgtgccccaagcaattactttcccttcgctgtttattcctattgtctgtgctcgctgtgagtctatatcaataaaatcatagatatattctgatttaagcggcttttggtatttttttgaagatttcaattcaaaactgctgtcgtccgtcaggcttccccagcgccataatgttttgttcacatcaacacctatagaaaacttatccccgactgcaacctcatttatatttttagtgttttcaacctttttgaacgatgcgttatttccgtcaaatacctgtcctgcctggtatacttccccctgcaaaacatatgcagtagagtttcctccggcaaaaacattttcaggatatattcctgttcgtattggggccgatgaatacgtttcattttctcctaaattcctgcccagctgaccatatgtattatcaccaaaaacataaagctggttatcattgcatatcattgccgtatgattagctccggttgcaatctttttgacgttgtcataatcatttaagtaattaaagggattcgggatacttccgcccagctgacctttatcattctttcctgtagcacaaaaacttctgccaagagaattatacctatatgtctgataacttcctgcttctacaatttctccattgtctgttccgtatggcaaattataatattcaatcttgttttcatcattaatttgcttttctttgttagaaccccaggagtatattctataatttggaactgaactttcctgtctcaacgcagaagcgtgttctactcctgctgtaatatcagatattcctgtcagaatttctacaggtacatttttattaacataagttccgtctcctagctgtgcgcttgaattatctccccagccatacaaaactccgtcttctgtcaaagcatatgatgtgttggcacgggtttctgcttttgctattcttttatttccccacactgctttaacttctgtaaaatcctcagaatcaatatttgtgccgttacctaactgtccgcagtcatttttcccttttgccatcacttttccgtcttcaactttaagtatataactgtttccaatggctatgttatggtctctatacatttccggtgagtttacatacgaattaaatattgaaaccttttttagacgaaatgaatcattgtcattttcaggtataaatattgtgctcccgtatgatgttactaactgatagtcaaccaaatccagtttatatttctcatcatataaattgaattccatccatgaatcataatatggatcatacagacacggtctgtcctccgtggtatatttatgtccttcatcgtcaccgccaaaccatgatgttccgccctgataatacaggcaactacctaagtttgtaaatattccgccgaatataccgatattatctgaattagagggtcttatttcgcctcttttccatgtttcatctatagtatcataaatatatacatcatttgaatgctgatcagcataccaatcatgtccggcagtaaaatatattctgccgttagcggctgttgaaactcttccctttaaagagtgaatttcgcctttctgcacaggaattgtccactggtcattttcaggtgaatatttatatagactaacctctccgctggagtcactcggagagctccctgccggatttcctgacacaatacctccgccaatgtaaatatttccgttcacagcatgagcgttaaaatacgagcctgtctgcggcatgtttgacttttgagaccatgtttttgtatttgtgttaaaagcctgaacctcgttgcctgccgcatttggaccagcccctccaattacatatattatatcacctattgctgcaactccggcatatgctctgtacgttggtatcaccggataaattgaccaactatcgtttgatatattatatgcaaatgtggcgtctgaatcaaaacaataaatatatccattacactgagtaacaggaactcccgtacctacgcttccgtcgacagaacggctgtatgaaatattaaatccaccgccatctgcatagtcgaaattttccgaatattttttaactttctcgctgtaggcagtctcctcatcattttcatctgacagaagcattaactcactttcattttgtatcaaatatgtattatgttcatacgtctctttactattaccagggataacaaatactgtttctttgtatctatatccggcagcatacactttcaggatatgctttcccaccggtatactgtcaaaatgtgcaacaccattcgaatcagaaacagcatgatcttcatcaactgatacatctgcattcggcacaattattccgtcttgtgtagcaacattaatttctatctgacgtgaaaattcttcacctgcattattatccagcaacgcaggtgaaggaatagtttcctgcggttcggaactttcaggtgtttcaaccggctcctgtgtaaatattaattctgtgggttccggagttgtataaaccggttgctttgtaactttatcctcaaattccggcagcgttacattttcagaaacatcaacgtcgttattctcttccccctgagaatttactataccaaaattactcatacatattaacattgacattgccaatattagacttattaaccttcgcttcactttttctccctcctaatttctcttttttcttttttgtttttttacttaattaaaatgcaaatttaatattttcatataaaacaaatttaaaaatattttcttcaaagtatgtattacttaaaacaattaatatattactatattttcggatgataaaagtataattaaaattcatataatactgcaatctctaacacgaacttattttcattttttcacttcctttctttaaaattaattcaaatatcataaataaatttttttgaaatactaaatatattgtaatatactattttttatagttcaaagaaatatttaaaatgtctgaatgaaaatattaattgattaacaataattaaaccatttaactataaatagctaaaaaaatatgcgtaaagagaaaattaataaatttaactttctatttacagtttataattcacgatattatacatattacattttaataatttataataagtattattatgtatatttctgtgttaatgcaaaaataaaataaaaataatttttaataaccgcatattatattggattatttttacaatattattgtagtatatattaccaaattgtcataaaattgtcaacatttttatgtatattttcctttattttaatgaataagttatattttaataaataattataataattaagataataaataaattaaatctagctattatataataactagatttttaatagaaatttatgatattctattaattaatagaatatattttaaaaataattttaagttctgcgttaattttactcaaatttataccatattctaaattcttattttattatcaatttatatcaattaacatattatattaattttaaagcgcctcatatctttttaattattttttataatgttctacaaatatctagttattaaatttatacctattgaataaaatatataaatattttttactatacaaatactaattgacatacaagttagagtgtgctaacctatatgtgaggaaatagcttgatcatgcttttgataaggagtgtttattaatgaaaacgcttaaagatgcagaatgcggcactactgtcaaagttgtcaaacttaatggcagcggcgcattaaaacgaagaataatggatatgggaataacgaaaggtactgctataagtgttcgtaaatttgcgcctttgggagacccaatggaattaagagtaagaggttatgaactgtctcttagaaaatgtgacgctgaacttatagagattgattaacatacatatttaaggagaaatctatgactgtaaaaatcgcacttgctggaaatccaaattgcggaaaaactactatatttaacgctttaacaggatcgaatcaatatgtcggaaattggcccggtgttaccgtagaaaaaaaagaaggtactttaaaatataacagcgatgttattattatggacttgcccggcatatattcattatctccatacacattagaagaagttatttctcgaaaatatttaattctagaacgtcctgacgtgattttgaatgtaatcgacgggacaaacatagaacgcaatctatatcttacaacccagctgcttgaacttggaatacctgttgtaattctcataaatatggcagatattttaaaaaaacaaggcgatgttttaaatcttcaaagattttcggatgccttaagcggctgtccggtttttgaggcatctgcgcttaaaaatgacggtatttctcaggctgtagataaagctatagagttagctcaaactgataaaaataagaaaattttaagacctcttctttttagcccaaaacttgaggagactcttgcatttatatctcataagcttagcagggaaatccctgatatgcaaaaacgtttctttgctataaaaatttttgaaagagataaaaaaattaacgagttaataaattcaaattatattccaaatgttgaggatataattaaaaagaccgaaaagacttttaacgatgacagtgaaagtataattactaacgaacgatatgcttatattacctctattattaaaaattgttatataaggaagtctgataatgaacagacattatcagaaaaaattgatttaattctaacaaataggtttgcagctataccaatttttataatagtaatgtttgttatgtactttgtttcagttacaacagttggttcttatgtaaccgattggatgaataatggaatatttggagagggatggagtttatttggaaactggataccgggtatcccggtaattgttgaaagtttcttaagctttattggaactgcggactggctcaatagtttgattattgacggaataattggcggtgttggtgctgtgcttggttttgtacctcaattaatggtgctttttatatttctagccttcttggaaggctgtggatatatgtctcgcgttgcttttattatggacgaagttttcagaaaatttggtctgtcaggaaaatcatttattcctatcttgattggaacagggtgcggcgttccgggaattatggcttccagaactatagaaaatccggctgacagaaaaatgacaataataacaacaacttttatcccatgcggagcaaaacttcctgttatcgctttattttcaggagctttattcggaggagcctggtgggtggctccaagcgcatatttgcttggaatatcagcaattgttgtttcagggattatacttaagaaaacctcagcgtttagcggagatgatactccgtttgttatggaattgcctccataccacatgccaaccgcaacaaatgttttgagaagtatgtgggaccgctcatggtcatttataaaaaaagcaggaacagtgatattaatttcaacaataataatatggtttttgtcaaatctcggctttgagaacggaaattttggatttgtaaatgacttttctaatggactgctgtcttacattggaagatggatatcatggatttttatacctcttgggtttgacagctggagagaaactgttgctacacttgcagggcttattgctaaagaaaatatagtaagcactcttgcagtcctgtttgacttttcgcaatccggttcaattgaaggttcctggcgtatattgacttcagcgtttacaccattatcggcctattcatttttagcatttaatcttttatgtgctccatgctgtgcagcaatggcagcgatagcaagagaaatgaataataaaaaatggactgcatttgctattttatatcaaacgggatttgcgtatataatttctttatgtatctaccaacttggctcgtttatagcttatgggacatttaatatttacactttctttgctgtaatagcatttgcagctttattatatgctatttttagaaaaaacagatataagaagtcaaatgagtatttaaatgaatttaataaaaaacggaccgcataaaaaatgcaggtccgtttttaataattatatatttaaaattctttttgcgtttttataatatatattttctagttcaattttttcaagaccgatactgtctataaactctttttcttcttttacccggtgccatggattatcggttccaaataaaaccttatcacttccatgatttctaacaatacgtttaaattgttccttatccataaatccggccgtatatgaagtgtcaatcattattggtgttccaactatgtatttttctacggcatcccattcttgccagccgcccatatgagctgcaataatcttatctccgcttatataatccaaaacatgattcaaacattccggcatgcagtgaacaggctttggcataccaatatcctgtccggcatgaaacacaacataaagaccaagttcatctgtcttttttaaaattctttttatttccggggaactcacaaaaaccccctgatattccggatgtaactttatacccaataatccggcctctttgatttcttctagaactttctcacaatcattttgtaatgggtgaacgcttccaaaagatataattccgttatgtccatttatttccgctgcaaatttgtttattgatgttgattgggtaacggtggttgcaattggtaaaaccatagaatagtcaacattatcctctttcattgttttcagcagctcaccaaggctgccgtctgttctggcgggaaagttttcaccctgaatttttacaatattatcctcaagcgaatgaattgctctcttagatatcttgtccggaaaaacatgcgtatgaaaatcaataatcactgtaaatcctcctaatattaattgtcatatccaaaaatttcattagcaatcttgacggttgctcttgcgtcttttccataataatcggcgccgacaaaattaacatactcctcatttaatacagctccgccgactactaccttagcgctgcttcctgcttctcttaaggcagaaattgtatctttcatactttttaccgttgttgtcatcaatgcactgagaccgaccagcttaatatcattctgaattacagtgtctacaacactttctacaggaacgtctttacctaagtcaattacatcataaccataattttcgagcagcatttttacaatattctttccaatatcatgtatatctcccttaactgtagccaaaacaattttgccttttttattttctccttctttttttgaactgtcacgtatgatttcaaaaccacattttacagcctctgcagattggataagctgcggcagaaacgccgttccattttcgtatctatctcccacaatatcaagtgccggaataaaataattgtcaattatttttatagggtctaaatctttgagcatttcttttgttgctatacctgtttcttcacgtcttccatcaatgatataagaagtaatatctttatttgtaccttttgacgcattcatattatcactaacttttccggcactatctttgccggaaccgatttcagacatataatctgcatagtttgaaatataatctacagcgtcaacatcctgattgttcagcactttaaaacctcggactgttttcataatatcaaaactcattggattaactattgccgaatccagccctgcaccaaaacctgcggccaaaaatacactgtttaaaattggtcgcgcaggaagcccgaatgacacgttgcttactccgagcacagttttaaccccaagtctctcttttaccagcttgatagcatttattgtttctataactaacttctgttgagctgaagctgtaagtactaaacaatcaataataatatcttcttttggtattccgtatgtttccgctgtacgtactatcttctcagcaattttatatcttccctctgccgtttcaggtattccggtttcatcaagacataaacctacaacaaccgcaccatattttttagctattggaaaaatggcgtccatactttcttgtttgccgttaacagaattaataataggcttaccattatatttccgtattccagcttcaacggcgtttttgtcactgctgtcaagctgaagaggcaggtttactgccgcctgtatctcactgacggcttttgcaagagtctccgcttcatttatctccggcaagccacaattaacgtcaaggacatcagcgctgttatgcatttgcgagatagcttcactgactaaatacccaaaatcctgttgtcttaatttttccttcagttttttctttccggtcgggttaattctctctccaataactgtaacagcgttatcaaaaataactgttttagttcctgacgacactgctgttacatgctcatattccggactgaaaaactcaacatcctcaaccaattttcttgtttccttaataaactccggagttgtgccgcagcatccgcctataacagaaacgcctttttctgcaatttttttcataaagttagaaaaatcctcagccgtaatattgtaaactgtcttatcattctcaatatgcggaagtcccgcattaggctgaaccataaccggtacccgtgagtattttataagctcatctatagttggcaataattcttttggtcctagagaacagtttacacctaaagcgtctactcctaatccagaaagagtgacagcgaccgacttagggtcacagccgacaaatgttcttccgtcttcctgaaatgtcattgtgacaaataccggcagttttgtgttttctcttgcagcaagaatgccggccttaacctccaacaaatcagacatcgtctcaaacaggactatatcagcaccggctttttcacctgcaactaattgccgtttaaacatttcatacgcatcatcaaaagataatgttcccatgggctccataagctgccctaaaggaccaatatcaagcgctgaaaactttgcgccgctttttttagcaagctgcactcccgccgttattatctcttctaccgcgtatccgcagtcagacagctttaattcatttgcttggaaagtgtttgccgttattacatctgctcctgcttttacatattctttgtgtatttcaagcactgtttcaggtttctcaatattatatacttcaggaagacctccaggctcaagaccggatttttgaagcatggttcccattgctccgtcaaaaaataatctattatgctttatatactctgccacgctcacaagtagttcctccttttctgaacatacaattttctctcattgaacaaatatcgcattttgattttttctttttaaaacttatattttcagtaaatccaattattgcggtaaccgactttccgggtatcattaaagagctgttcgtcactgtcaatccaatttttctgttggcgtcaagaacatcgagtaaatttttctgaatgtcaattggcaaatctccataaccgggagaaaagcgcaaatttgttcctttccctaaaacttccgcctcagcttttattttcttttcaacttcatcgcaaaccttttcgataaattcagtggcgcagctatccattactaccgccttcagcatatcattcccttgtgcaatacgtatgctgttatcaacttctataccgagcgtcacagccataacggcacattttcggcattcgcgcaaatgctcatatatatcattgccttcaagtcttaaactggtaccaacaacatctatacaagaaactgcatcatgatatccgacttttatatcaaaaatcttatacacatatctataccgcgagattttttttatttcctctatacagttatcaatcatagtttcggtattagtatcaatttcctgacctctatgtcctaaatatcttagtatttcatttttatcaagctcaatattaaacattaaaccactctctcaaattatattatacatattcaagaagctgcttagctatctcaggtttgttcatagaatacagatgtataccacacgtattattttttaccaaatcgcttatttgtcttccggcatactctattccggcttttagaagatcgtcagggctggattcatatttatatagaattctaaccatttccgaaggcaaagacgcaccgcacataaatatcatattagaaatctggctcttagacatcattggcattataccgggagttattggaacggtaataccggctttttcagcagcttcaaaaaatctataaaagtatctgttgtcaaaaaacagctgtgagacaaaaaaatctgcacccgcttcttcttttattttcatatgttctatacttttattaaaatcatcgcattcaatatgaccctcaggataagctcctgcagccacacatagttcactattcgtcttaatttcttttattagttcaaaagcatgactataacttgctttttcaggctcaaaaccttcttttggaatatctcctctcagggctaaaatattttctatcccttcgtcctgtattgccttcacctcttcaagaacactatcaggtgtagaagaaatacaggtcatatgagccatagactcaatattaaattcattttttatctttgatgcaagctctatagttttatttctgtttgaacttcctcctgctccgcaggttacactaataaactttggttcaagataagacaattcttttagcataattcccacattttcaaaagcctcttcctttttgggaggaaaaatttcaaaagatattataggtttgtcatttttatttttaaacagttgagaaatcttcatattctatctcctagtatcaaatatatttaaattttcatacgcagattaataacaaaaaccgtaaaattttaaaatattatatcataacaattgtttatatgcaaataaataaatttgtaaattatacaaaaataaattatatacactctatatacttgacaagaatggaaaagaaagttatatttaaacttgttgtttttcaatattttaaaatttatttagattggagatatgaaaatgagcgaaaattgcacacatgattgttcaagctgcggtgaaacttgctctgaaagagaacaggaacaaaatagttttagggtagatttgggagcgcatagttctgtaaaaaaggtaataggtattgtcagcggaaaaggcggcgtaggtaaatctctcgtcacttcacttttagctgtaaacatgaagaaaaagggacacaatgttgcaattttggacgctgatataacaggaccgtcaataccaaaagctttcggtataaccaataaggccgttggcagcgactttggtattcttcctgaaaaatcaaagcttggcattgatattatgtctataaatttgctgcttgaaaacgatactgaacctgtagtttggagaggtcctattattgctggaacagttaaacaattttggagtgaagtagtttgggaagatgaggattatatgtttgttgatatgccgccgggaaccggagacgtaccactgacagtttttcagtcactcccagttgacggtataattattgtcacttcaccgcaggagcttgtctcaatgattgtcggcaaagcagtgaaaatggcagagttaatgaatattccgattattggacttgtcgaaaatatgagttatgtaacctgtcctgactgcggcaaaaaaataaacattttcggagaaagtcatatagatgaaatagcaaaaaaacacaacataaaagtattggataagctgccgattgatccaaacattgcgtccgcatgtgacaatggtataatagaatcaatatccgaaaatccaataccaaactctattgaagcaatagaaaatttgtaataaaattaaatgtaatgatatataaaaggtcataatgtggtatttcacattatgacctttttgttatcttatataatttgtttttatctttgcttcacgttcaggcggttctattccggcctcttttgctgcatttaaagatttcaaaatccatgccatatttcttccaagtattctcatagtctgaacgccttcttcgtctttcaaaacttcctcaggagtattcccatgaaccatgttccaataatttgaacaaacaataggcatatttgttatgccaaaatattttgaaatttgatcaagcgttgctgatgcgccccctcttctgcagcttgcaacaactgctccgggtttatatgccaagttagaaccgccagcatagaataatctgtctaaaaatgaagttattgcgcctgacgcagaagcataatgaacaggtgagcctataattattgcatcggcagttctacagctgagaatagctttatttaccacatcgtcatcgaactgacatagtccgtttccatttttagcgcacatgccgcatccaatacaccctcttatagggagcataccaacctgaaaaatttctgtatcaatcccgtttttttcaagttcatctgctactatgcttaaagcagtgtatgtacagcctttatgttttgggcttccgtttactaataatactttcataatttaacctcctcataaattaacttattattattttaatggtattataactatttgatataattatatatttttttacattttaagtcaagaaaaaagactctcattataaggagagtctaaaatataaaaaggggttatgaaaaacaatagattcagcgtattaatcatcacctcttctattgataaattaaaatccgcctcgaccgctgccgaaccttcctccaaatgttcctagttttgaaatggtttcagaagctgttatacttccaacttcagctcctccaatgcaatttgaaggctgactatacagtccgtcaatactttcactatcagctgttccaccataagagatagtataaatatcatctgaatctaaatcaggtgagctgaaaatcaaagcctggtattcttttgacggcttaaatgtcattatattttcaccgcttgaatttttgatattaattatagtctctttttgtacagcttcagacaacgataccactaaaacattttgttttgaatcatcacttggtatttcaagcataccattgcttccgacagcaacaatataaccaccgtttatccacatggaaccgtctgtatcaagcggactgtctccgccgctcgttggaccgtccaggatgatcgttccgccattaacttccaaaaatccatttgagtcaattgcgtctgccattgcgtcaatatagatataacctccatttatagtgatagaatggccgttattatcaatgtccgtacgctgtcccccaaaattagccggaccattaaaaccagatatattttgttcattatcagttgatctttcaccatttggagggagggaatcgggctgctgcattatttgttctgtattaccagggaaaaaatcaggcggcatattattttgctgattatcaatatttccattaacaattctctcagcaagacgttctaaaattatacttgaatccattacaccatgttccatactatcactgcctgttcctccggcatttaacccatcgtctgtggatattatatgaatgtttccgctgttgattgtcatttctgctttactttctattccttctgtggaatattctatatttatatcacctgcattaacattcaaatttccgtgagcgctcatacctttgccctcttcagaataaatatttaattcaccgccatttatctcagtaatatctcccgaatgaatactatggtcaattgaatgtatatttatttttcctgagtttatataaatatcttctgctgcttttaatccttttgaacttttttcattggtagtaacgccttcatcctgagtttgctgtgtgtcttcaatatttccacttattgataattctccgttttcaaccattgatttaagcttttcagttacttcctcaacggtcatattatcaaaaactgaagtatcaatgttatttaatatttgtgaaataccgcctttttcatttacattatttctgtggttttccggtaaagtgttagaatcaaatttcgctccgtcgtcctgctgctcatttctttcaaaatcattcggaaaaccggcaatgtttttgcgtgaaccgattatttccccgatagtagttatatttatttcaccgccatctactgtaatattccattcacccgactgaataccgtcaccgtctgaagtaatattcaaagttcctcctattatcttaacaccacatttggcatgtatcccgtcacctatttttgaatttatcgttatattcccgttttctatccttatatcatcatcaccggcaataccatgtttataattcgcattaattattaaggaaccattgccttttatctccaaattatcatcactgaataagggagcacttgcgtcttcataattatattgctcactatcagtaagcgtattatcagttccgtctgttaaggttatatatcctttgtctgtattttcaaaatatattgccgggccgtcactatttgttatgtctacaccgcttaatctaagcttaactttttcatcggtatttacaataatcattccgtcttctgttttgccgctgacttcaaaatctccgccttcggttatatatacaattttatcatctgctctaactccgcttccgctcacttccatagaagtcatatcaattgttccaagattttctttccatgaatcatcttcaatcttttctttttcggttatataaacagtatttgtattttcattccattctacctgagctcctaaaaattcagatattaatcttaccggaaccaatgttctgtcatttagtacgaccggaactgtctcagaacttatcacctctccgtcttgattagtgatttgaccgcctattgtcatagagattgattttttcttctttttcacagttacagtctgagtttcttcgtcccattttacctttgcgcccatagcttcaaatatagttcttgccggtaccatagtaaaattatttataatctgaggttcgacatcaaaaactaataattctccttcataataaacatttatgttttcctcagccagcgacgttatcggaaaggacattaagaataatagtataaatacagagaatattgaacataatacttttttcattttattcctccttaaaaatatttccacttgactatacgaaaattataaattagttttcttaaataaaccttaaaactaaaaataaaattgtaaagtttatatgaacaaaatctctatataaaaactgaatagcaatttggctataagggtaaaataatccaggtgataaaattgatagatacaaatttaaaaaataatgagaataccgtaaaacagctgtttaactcagataagaatattgattttaactttcgcgaatttaaagttgagtttaaaaacgaaacggctgacgcttttttaatatactatgacggaatgtcaaatcaaacatttttaaaccgcgatattatgcggtctttgctcacatgcaaagcgtatgacacaagcgtaacaccaaaaaaagatattgtttttaaacaaatagtatcagtggcgcctctaagcattgccgaagattttgatttaatcggagaaaaaatctcttttggtgaatgcggtatctttatagacggctgcgactgctgttttatagccgatataaaaggctgggactcacgaggagttgattcgcctactcaggaagtcagccttgcgggacctcaggaagcgtttgccgaatctataatgacaaatttagcacttgttagaaagatattaaaaaatcctaaattaaccgccactaatattccggtaggcaaaacaaataaaattccctgcgctttaatgtacattgaaggaataacaaacagcaagcttatcaaagaggtaactagaagattaaaagatatagataccgagtatatattttcttcaagtgatgttgaaatgctgatagaagacaccacttattttcctatgactagaaccttaaaaacagagagacccgacagagttgcctcaatgcttgtcgagggaaaggttgcaataatagttcagggcagcccatttgcattgatagttccaactacttcattagatttgatagaagccacagaagacaattatgtacgtgttcccgaggcaaatttgatgagattagtacgaatatttggcatgtctctgtcaattcttcttcctgcactgtttattgccgtaatgttataccaccaggcaattctccccactgacttactaatagctatttcagccagccgtgaaaaagttccatttccacttatagtagaattaatcttaatggaaatatcatttgaacttataaaagaggcatccgtcagagtaccaaacccaattggcagcactcttggtataatcggtggactgattttaggccaggctgcagttgaagcaagcatagtcagtccaatattaataataatagtatcaataggcggaattggagcattttcgacaccaaccttatcactttcaagatctctcagcgtattaaaatttgtatatatagcagcggcatatttgtttggaatagttggtctggtggctgctataatgataactttgtcaggattggcagcgactaaaacgtttgggtttccatttctatccgatttcggaattaacgttcgttcatctgaatcattgcttgtaaaaccaatatggaaaaaagaaagacgtccggctgaactcaaaacaaaagataatataaaacagccgcacataagcagaaagtggaaaaaataaaaggaaacagagtgatatctatgaataaaaaaaatatcaatttaggtatatggtgtttaacatttaactgtctgctgataaaaatatttataggattttcgaacattctgcttcacgagacaggttcttcatcatgtttggcattaatctttagttttgctgtatttacggcgattttgtttatagtttactttttcaaaagatattttatattgagccttaaaaacacttatttaagaaacactatatttgtgatattaattggttatttaatatcacataatatatattttatttaccagctgattaatacaataaacaacagcgcttatcccaatactcctctttggattgtcttgacattaattgctgttacagtgctgattgttggaatcagagacttttcgtctatcttaaaactgcatagtatatgcgttccgttaataataattggattgattataatttcaataagcagtataaaatatgatgatatatataatgctcttcctgtattaggaaatggaatcgcttccacgataagcagcggattcaaacatctgtttgcattttcagaaataatagttccaattgtatttttaacaataatgcctgaagaaaagtctaaaaatataaaccgttcaaaaattatattatactcagcaattattggcgctgggatttacagtatatttactataatatctctgctggcaatcccgaccgactctgtttttgtagcagaaaataatccattgttccatatatcaagattttcaggtataaaccggcttaacacccggcttgatgtgttaaatataattatttcaatcacatccggtatattatatttatcaacatcacttgcggtcataagaattcttatgaaaaaaattggtttaccaaaaaacagcttcatgaaaacaaccgcgtcaatattggtattgttaattggaatagttcctctttgcggctgttacgacaacagggatattgaagataccgcatatgcaatagctgttggcgtagataaagacgaaaatacaggttcattgatattctcatttcaatttacaaatccgctgacaaccggagaaaatacagacccgcaaaattcaggttcagaagaaagtgaaacagaaaataagtcagtaaacaatatttcaattgatgctgataatatatttgacggtttagagagcgttaaaagatttataggcaaaacgccatcactttcacatttaaaacttattgtcttttcaaaatcaataactaacagtgatgggtatttaaaaaatatctgtgaagattttattaacattaatgatgtgcgtccggaaactaaaatatgtatagcaagcacagataccgctaaagagtatctatatggagtcaacccatcactcgaagaaagtacggctagatattatgaattattattttcagattcttctacaaccgaaactttgcaaacaaatttaagaacatttttaataaaacttaccggtagttcaggagacgggtatcttccaattatttcaccggatggatttacgggggcaatcttgttttccggggaaatacccaaaatagaactaagtaatcatgaatgtcaaattataaacatacttttagggatagaaagagattctatattttttacttccgaatccaccaatcaagtctacaagataaaaagttcatcacctaatataaaaacaaatatagagaataaaaaaatcagtgctgaaattgaaaccaaaatatttgccaagaaaaatcaaaatggttctgaagataattatgaattgctctatgaagatttaatgaatgatagtaaaaatttaattgaaaaaatatatcaaaatcaatgtgatatattatcaatcggaaaatttgcaaaatctaaattcttatatgaatacgaatggaaaaatgtaatccaagaaaaagaaaatatcataaatataccgaccgttaatattaatttattatattgatatagttatatagtaaaataaaaaatttcaaaaaatgacacctgccttttgtaattgacaaatttagatatatgtggtattattatcatattgttaaggaggtagcaattatgaaacctactagtgtcattcgtgaattagatcactatggacgtctcgttattccgagcgaaatgagacgggtactaggtcaatcagatgatgaaaaaataagagttgaaatatatacattagacaataagatatttattcaaagagttacgccttgttgtgctttctgtgatagagaagataatttagttgaatacaggggaaaaatgatttgcaaatattgtcttaatgatttaaccaaacaaatataaaatatgacctgcgtattaatccgcaggtcattattattttaagtataaacttgttaatcagcaaataaattttcatatgatggctttggagttgctgttgttttatcttcattgcttacaacaggtgacgagctattacttttttctattgttcttataccggtaatagcccttttaataggtatagaatatccactctcatcatttaaagataccatagtagtaatttttacttttgttccaatagggttattattttctacaccaagctgttcagtccaaaaattttctacttcaggaatatcagtaataggaatcattttatatggctcgttttcatcttgtaaataatatttagaatccaattttgatattataccaacagtcgaaataagagttttatcttgaacatcttttttatcatataagtcagctatcgaaactacattttctttagtttcatcataatcatctaaaatatatacgttcatagctctgtcggtcttaccttcatcttcattaacaaatttagcgtttacatcagctccaaaagcctctgaaattgctctagcaggcacaaatgtacgaaaatctctggttatatctccctggaaagccggagcgtccagttcaactgtttctttcaaagcttgctcttcaccgtcaattttataaatatcaagtcttggcaagccaataaccaaacgtaatgtagtatcatatctcacaatctgaatttttttatcagtattaaaccaatatacagtagctcctaaagcttctgcaatggctctaagcggtatcattgttctatcattttgaatgtacggacgttcagcctcactaaaatcaataggctgaccgttaatataaatgttttcaataggtgatgcagcgtagcttgatatagaaaaactgcaaattataccgatggttatcgataaacttataaacaaacaaatcagttttttcataataaccttccttaactatatatttaatacatgattttttcaaatctaaatttattttatattatactataaatcaaccgaatatgcaacagaaaataatgtcaaaccttttagagtaagtcgcagacagctttaaaaccatacattgatttggaaaattttatagcattaactattgctttagacgtcacatatgccgataaagttccaaccaaattaatgtcagcttttaaatcacccagcgataacgcatatatagtatctccgtcaagagtggtgtgaacagggcatatacttcgtgaataaccgtcctgagccatttgagcaacttttgtcatatgtgttttatcaaagttagcatttgttaaaacagcaccaattgttgtatttgtaattatttgattttcaaaatttgaatagaattcaaacattaactcttgacaatctttctcagatagttttgttttatccttattcagcacccctgcaactttctttcctgtttcaaaatcaaaaatatctccgaaagcatttacaactactatagcgccaaccataagaccgcctaattttgctgcatatataccaattccgcttttagtacaacgatccattcccaacactttgcctacagtggctccaacgccagctccataacagccttgctcaggcatatttatttcagcattttcacaagcttttactgccatatcaaaattaggcctttttttcattgaaccaactgtcaaatcaaaaatagatgattgacaaacaataggaactttagtaacaccaacatcaaatccaatacctttggattccaaataactcataaccccgccggacgcatcaaggccaaaagcactgccgccgctcagaaccacagcattaattttatccatagccatagtgggattcaaaagctgtgtttcacgtgaagccggcccccctcctcttacatctacgccggcaggggctccgtcttcacacaaaataacagtacaaccggtgccgccttcaaagtcctccgaacttcctatctttacatttggaagttctgtaatgcttatttcctctataagattatctacgaacattttgctcacctattgcttattatcattatctctaatctcaacgcgccttatcttgccgcttattgtctttgggagttcatcaacaaattcaactattctaggatacttataaggagctgtatgtttctttacataattctgaacttctttttttctttcttcgctgcctttaacaccttttaccaaaactattgtagctttaaccacctggccacggatcggatccggtgcaggagtaatagcgcattccaatacataaggaagttccatgataacactttcaatttcaaaaggtcctatacgataacctgatgattttatgacatcatctgttcttccaacataccaaaagtaaccgtcctcgtcacgccaagccgtatctcccatatgatatacgccgtcatgccatgcttcacgcgttaattcctcagaattatagtatcctttaaataatccgcatggaatactgttcttagtattaataacaatttcaccgacttcgccggctgcagcagatttaccgtttggcaaaacaatatcaacatcatacagcggactgggtttgcccatagaacctggttttggcgtcataccaacaaaattgccgactacaagagtagtttctgtttgaccaaatccctccataagctttataccggtatgtttataaaattgctgatatacttcgggattaagcgcttctcctgcaacagtagcatactcgagtgaagacaaatcatattttcccaagtcttcttttataaaaaatctaaacatcgtaggaggtgcgcagaaagaagtaatattatatttcttaaacagcggtaaaatatcctctgcctcaaatttatcaaaatcatatgtgaatactgcgccttcacacatccactgaccatagagttttccccacagcgcttttccccagccagtatctgatatagtaaaatgaataccgtcaggatttacattctgccaatattttgcagtaataaaatgccccaaaggatatttatggctatgcattgctatcttaggatatccggtagtgcctgacgtaaagaacatcagcatagtttcgtctccgcatgcagtttcatccgtattctgaggacgagggaattcatcactgaagttttcaatttcattgtcaaagtcatgccagccttcacgcttgcctccaaccataatttttaagacatcaaaatcacaatttttttcgccaagctctgcctgatgtgccgtatcaccatctgaagtacaaactatagcctttacttcagccgccttaaacctataatcaaagtcgtgctcaacaagcaggtttgttgcgggtattacaacagcacctatcttatgtaatgcaagaatagaaaaccagaattgatagtggcgttttaaaacaagcattactttatcgccttttcctattccaagtgacttaaaataatttgcagtcttagcggaatactttttcatatcttcaaaagtaaacctgcgttcttctttctctctagacaaatgcagcatagccagcttatcaggatctttttcagcaagcctatcaacaatatcaaatgcaaaattaaaattatcttcattaataaaatctatcgatttaacaataccgtttttgtccgtttcagttttaagatagtttttatatatcatatcatctgaatcttcacggataggaacaggcttttcaggagttatttcaacattttctatatagcttgtccctctgccgttgggagtcagcactattgcataaaatttacatgtgtcacaatcaacagcaatcataccgtgaggagtcttactgtcgtaataaatactatctccgggattcaatatttcaatattatcacctatttgcactttaagcttaccgcttaaaacaatatctaactcttgtccctcatgctttgaaagctttatatccttatgctgttccgcttcagaaaatggtgcagttacaagaaatggttctgcaattctatttttaaaaagagacgccaaattattatattcaaattctttacgtcttactattttcataccttcaccggcacgagtaagctcatatcctgacaaagttgcgctttgtccttctaaaagatccgtaacatctacgcccaaaactctagcgcaaagacatataaatgaaaaactaaaatcactttcaccgttttcgatttgcttatatttttcgatgtcaactgaagtcttttcagcaacttcttccatcgttaatccatcaatttcacgtaaggtttttatacgttcagcaacctcttttattcttccgtccaaaacattgtccatactgataactccttaaaatacaaattttataaaaataatagatactaatattatttagtaaaataatacaaactctataaatttaagtatagcattactaaaaatgtttgtcaacttacttatattttagctttttcgttctttttctctaaatatttttttaaatattgacctgtatatgacgcgctgttttttgccactttttccggcgtacctttagcgacaatagttccgccgccgtctccgccttccggacctaaatcaataatataatcagcagttttaataacatccaaattatgttcaataaccacaaccgtatttcctgcatctacaagcttttgcaaaacatttataagcatatgaacatccgcagtgtgcagtcctgttgtcggttcatccaatatatatattgttttgcctgtgcttcttctgctgagctcagtggcaagtttaactctttgagcctcacctccggacagagttgttgatggctgacctatttttatataacccagtccaacatcatataaagtttgaagttttctgcttattttaggaacattttcaaaaaagctgcacccttcctcaaccgtcatctccagtacttcataaatattcttacccttatatttaacttcaagtgtttctctattataccgttttccatcacaaacttcacaaggcacatacacgtcaggcaagaagtgcatttctattttaattattccgtctcctgtacaggcttcgcatcttccgccctttatattaaaactaaaccttcctgacttgtagcctcgggattttgcctcctgggttgccgcaaacaactctcttatatctgaaaacagacctgtatatgttgcaggattacttcttggagtacggccgataggagactgatcaatatcaataaccttatctaaattttcttcaccctttatactcttaaacttgccgggtttcttttttgaaccatttaatacatttgataagtgtttgtataatatctcgtttacaaatgagctctttccgcttcctgatacgccggttatacaagtaaaagttccaagaggtattttgatgttgacattctttaaattattctcttgacagcctttaatttctaagttaaatccatttccttttcttcgtgtttccggaacaggtatcaattttttacctgacaaatattgacctgttaaagaagtttcacatttcataatttccttggcggttcctgttgccactacttctccgccatgtattcctgcgccgggtcctatatccactatataatccgcagcaagcattgtatcttcatcatgttcaaccactatcaaagtatttcctaaatctcttaaccgtttcaaagtctcaatcagtttatcgttatctctctgatgaagtccgatactgggctcgtccagaatatacacaacacccatcaaacttgagcctatttgggttgccaaacgtattctctgagcttcaccgccgcttaatgtcccggcgcttctggaaagtgtcagatattccaatccaacattttttaaaaatttcaatcgctcttttatttctttaaatatattttcggaaattattatgtctttttttgataaactgatttttatattagagaaaaaatcgtaagcttcagttatagacatatcacttacttgatttatatttaaacctccaatagtgaccgccaaagattccggctttaatctggctccttcacattttggacagggcatatccaccataaaggtttctatttcagctttcatccagtcagaatttgtctctttatgtcttctttcaagattattaattatgccttcaaatcttgcatactgaactccttttgaaaatttcctgtcataggtcagctttattttttggtcaccggttccgtataagataacatcaagtatttttttggggagatttttaatcggctcatcaagactaaattcataaagttcagataaacctctgtaatacatatacgaaatcgaatttttgtcagttccgttccaaccgcttgcggctattgcaccttggtttatagataattctttatcaggtataataaggtttgggtcgatttcaataatatgtcctaaacctgcgcattccggacacgcaccataaggagtgttaaaagaaaacattctaggtgtgagttcttctatgcttataccgcagtcctcacaagcataattttgtgaaaacattaactcttctccatctattatatcaacaatcacaagcccatgtgccatgtttaaagctgtttccaatgaatcagccaaccttttatcaataccctcttttataataagcctatcaacaactatgtctatattatgttttttctgtttatcaagacggatatccatatcagaaatttcgacagtttttccgtctattcttgcccttacaaatccatttttccttgcgtcttcaaacgtctttacatattcgccttttcgtcctctagcaacaggagccattatttgtattttagtacgctcaggcagattgcgaacagagtcaacaatttggtcaatggactggggtgaaatctcttttccgcaattaggacagtgtggcacacctattctcgcatataacaatctgatataatcatatatctctgtcactgttcctactgttgaacgcggatttcttgccgttgtcttttggtcgattgatatagccggagacaaaccatctattgattcaacatctggcttgctcatttgacctaaaaattgtctggcataagctgataaagattcaacatatctccgctgaccttcagcatagatagtgtcaaaagcaagtgaagactttccggagccgcttaaaccggtaaaaactacaagtttatctcttggtatttccaaatcaatatcttttaaattattttcctttgcaccttttacaattatatttttgttcatatttatgtcaactcctattataacgcttattcttcctgcattcttctaatttcatcacgtatctgagccgctaattcaaactgaagaagctctgcagcttttttcatatcaacagttaattctgcaattgctcgttccttatcaattaatttttgttcattcttctttgctgtctttcctttttctgacctgcttaattcagtggttgcttcaataacctcatatacttcttttttaattgtctgtggaattatattatgctctttattaaaggcaatctgtataccgcgccttctgttagtttcatctatagcatatctcattgaaccagttattgtgtctgcatacattataacttttccttttgcgtttcttgccgctctacctattgtttgaaccaacgatgtctcgcttcttaaaaagccttccttatcagcgtccagtatagcaacaagagaaacttcaggtatatctaacccttcacgcaaaagatttatgccgactaatacatcaaactcgccaagtcttaaatctcttataatttccatacgttcaatggtcttaacatctgagtgtaaatatcttacctttacaccaaggtcgtcaaaatattcagtaagtctttccgccattttctttgtaagagtagtaactaagaccctttcattattttttgtcctttcgacaatttctgtgtaaatgtcatctacttgtccatctattggtctgacttcaacctcaggatcaagcaaaccggtaggtctgattacctgttctacaatacgggtcgattgctctttttcaaaatctgccggtgttgcagatacaaaaactgcttgattcagctttccccaaaactcatcaaaattgagaggtctgttatcaaaagcagatggtaatctaaatccgtatttgaccaaattttcttttctggcacggtcacctgcatacattgctctaacctgcggcagcgtaacgtggctttcgtcaacaaacaataaaaaatctttcggtaaataatcaataagtgtaaacggaggactccccggttctctgccgctgatatgtctggagtaattttctattccattacaaaatccggtttctctcagcatttccatatcatatttagtgcgctgttctagtcgttgagcttcaaccaacttattattatttctgagttcttttaagcgttcttctaattctttttcaatacttattatagcattgtcacgcttctcaggcgtagtaacataatgtgatgcaggatataccgcaatatgctttctttcaccaataacttcacctgttacagtgtttatttctgtaatacgttcaacttcatctccgaaaaactctactcttactgccgtattatatgcgtcagaaggaaatatatctaaaacatctcctcttacgcgaaacttatttcttgaaaaatcaatatcgtttctttcatatttaatttctataagttttgcaataacttcgtccctgtcttttatcattcccggtctcagtgatataaccatattattatagtctattgggtcacccaatccatagatacatgaaacactggctacaataataacatcttttctttcaaataatgccgcagtagcactgtgacgaagcttatcaatttcatcattcgtctgagcgtccttctcaatataggtatcagagtaaggaatatacgcctcaggctgatagtaatcataatatgatacgaaatattcaactgcattttccgggaatatttctttgaattcgctgcaaagctgcgccgccaaagtcttattatgcgctaagactaacgtaggtttttgcaccttttcaatcacatttgccattgtaaaagttttaccgcttccggtaactcctaaaagcgtttgaaatttatcaccatttaaaataccgtcagctaatgttttaatagctttaggctgatcgccggccggcgaatattttgatacaactttaaaatccataacacacctccgtgctataaaataattccttcagataataatgtatttattaataacacttatctcacattgtaccacatttgaaacctataattcaacacattttttaaaaaatatgctcaaaagagaactcaccattataatgctttttagcgaaaaaaataaaccttgcgcgacacacctttttatgctatcataatgataccatatatgtaaattaaaggggcaactacaatgtttattttcaaaacaaaacatatacaaaagttaaaatactttatgttttttaccataatttttattattttctctactagttatactaatggttttagcgaggaaaataacaatgttagttcagataaaaacatacaagttttatttataagttcatactcgccctcaaacacatcggttcttaaacaactcgaaggtatacgcgaaacacttgatggctcagttacacttgaaagtgaatttttgaattcaaatataataaatgataataaaaacgacgcattattttatgatattcttaactatcatatttcttcatataaaaataatttcgatatagttatcgttggagacgatgaagcgcttgacttagttttgaaatacaaaaatgttctatttcctaatacgcccataatctttgaaggaattgaaaacaaattcattgctgaaaaggctgcaatggatccgataattactggttctatagaaaaattaaattttgaaaacaatattcatacagcactgaatctttatcctgacgcaaaaaatattattgctgtttctgataacacattaacaggtatcggtgacagagagcagttttatgcagagcaggaacaattttctaatataattttcaaagatattaattcttctgaattaaatgaagaagaatttgtatccgctctttctaaacttaataatgacagtatactgttctatttaaatatgaatgaaactattgataaaaagcaatactccgattatgaagtctgcaagctaataacagaaaatacaacaattccaaccttttgtttaactgatttaaatatcggtaacggttattttggtggagcagtgttatcttcaaagcagtcaggtataattgcagcaaatactgtaaattcaataattaatggacaaaatatatccgaaatacctttattggaaaattcaagttcaaaatataaatttgattttaaagtaatgaaaaaatatcatataaacagttcgtctttgccttcaaattctatatatgttaattatgagaaatcatttagagagaaatatggtaagcttcttgctattggttctattctaataatgatacttcttcttttgatacaatttgtaattaaatggtttgaatcgagaatgaaaaacagaaaattggaaatatctacttctacactgaaagaagcgttaaaaatttctgagagaaacggaattgcaaaatctgaatatttgaattgtgtgtcaaatgaaataaaacaaccaatgagtactcttatttctttaattaacagaacaaaaaaagaacttaatgattctgaaaaaactaaacaaaatattaatgcaattgatgatacagcacgcacactctttaactctgtaaatgaattgcttaatatttctaatctagatatacagactttagaaataaatcatgagccatttaaactaagccgcattctaaatgatctaagacagactttttcttatctttgtaatgagagaaatattactttttctgaaaacaggtatgatattactgaaaataattattatggtgattcatataagttaggcctactactatcaaatttgcttactaatgcgcttaaatacacagaaaatgggaatactattgacttaaaatcaacacaaaaaccatccggcgacaaaaattatgccatccttgaatttgttgtaagtgataccggcattggtatgagcaaggataaactggataaagtatttagcaataattacaacaatgattctgcacaaaatggcagcggtcttggtttatcaatgacaaaaaagtatatttctatgatgaacggaaatatttctgctataagcactgaaggtgaaggaacgtcaattactgttacgattcctcttgaaatttgtgaaaaggacggcaaacaagttcgtgtatacaaatcacctgaagaatataatttttccggtaaaacaatacttattgcagaagataacgaacttaatcttgctatattagacgatgttcttaaaactgttaattttaaaactatgatagctaaaaatggccgtgaagcagtatatacttttaataaagctcagtataaggatattgatgtaatacttatggatgtagatatgcctataatggacggatatgaagcggcaaatactatcagaaaaagcaagcacgctaactcctctactatccccataatagctatgtcgcaagacgtatatgaggatgatgtggaaaaaatcttaaataatggttttaattcacacgtgattaaacctgttgatgcagatgaattatattatactttagagaagtatttagaaatgtctgaagaaacataaaaatcaaacattagtaacctattaaagtttaactattgtaatcttcttcaaaagacgctaattcttctttagttttaaaaattattcctcgcgttaaatttaaaatatcatcgtcagggatatctgacgcatataccttaaatgagtataaaaatttttcagctgcttttgctgaatctgtattactgcacaaatatatttcaatgctgtttccattaaggcgtgcgagataatactgctcatttccgggtgtactgcttggaattgcttcctgcattcccggtgttgtttgcgatgcaactgcttcagcagaatttaaatttttagtgacagacctgtttataacgtttacagttgcaaaatatgttatataaccaatcatcaaagtaaagaacacaactgaaacacaaatgataatacttttgactaactttttatacataattagtacccccatatcttgtgttatcatatttgctgtaacactaatttaatagattattaacagatttatagtttattatacctgtttatgtgatataattatatagtataatatgtagtattttgatgattgatattttataaggggaaaaaataatgggaaaatacgttggaaaatttattttaatatttttaattacaattattattggaggagctgttgccggaggagctgtgctcactgctgtaatgggcatgtggggaaatactgacggcattgatttggattcgctgacaatggacagcaattcaaacatagtatatcttgatcccaatacaggagaagaaaagaatctcttaacattatcttctgatgaaaacaggatttgggtagatctggacgcaactcctaaaaatcttcaaaatgcctttattgctattgaggacgaacgttttcctattcacaatggagtagatataaaaagaacacttaaagctactttaacatattttttagataaactaaccggtaaaggcggccaagcttctcttggcggcagtactattacgcagcagcttataaaaaatataaccggtgatgacgaacaaacaatttccagaaaaatttcagaaatttcaaaagctattgacttagaaaaaaaattatctaaagatcagattttagaactttatttaaattgtatatttttatcccaaaactgtcatggagttcaaacagctgcaaatttgtattttgataaggatgtaagtcaattaaatctggcagaatgcgcttctattgcatctattactcaaaatccggcattatatgacccattcataaatccggataaaaataaagaaaaacaagaattggttttagcaaagatgctttctcttggttatataactcaggaagaatatgatgaagcagttaactatcctcttacattcagtaaagatacggctgcaactaaaaaagaagaaataataacatcatattatgttgaccaagtagtacgtgacgcaatatcaagattgcaggaaaaaggctattctgaaagtcttgcaacaaaaatggtatattccggcggtcttaaaatttactgtgcttatgacccggaaattcaatcaatagttgaagaatactattataatacaaataatttcccagattcttcagcccagtcttcaattgttattattgacccatcagacggcagagttgttgcaatggcaggcggaattggtgaaaaagaagctagttttactctgaaccgtgcagcacaaagtcccaggcagccgggatcaacaataaagccattagctgtatacgcacccgcactggataatggaacaataaacacaagtacaagagtgatggataaaagaaaatcctatgatggctgggtaccaagaaactatagttacacttacagtaattcagaagttggacttgactatgctcttcagcagtctttgaatacagtgcctgtagaaataatgtcggacatgggcattcagacttcgttcgattttatgacgcagaaacttggatttactacccttgttgaagcagaagaaataaacggtgaaatttacacagatcttggatatgcacaattggcgctcggcggtttaactcacggcgctacaaatattgaaatgactgctgcatactgcattttcccaaatcaaggtgtatataataaaccttacacatttactgaaattaaaaatgaaagcggtgaaacaatcttgaccggcagagacagtgatactacctgggaagcaataaagccggagaccgccgcaataatgaacagatatcttaacagtgttgtgaccagcggcaccggacgcggagcggccttgtcagacggaacctttactgccggaaaaacaggtacaacatcagaaaactttgacagatggtttatcggctattctccatattatgtagcttcagtctggtatggatatgatacgccggcttcaatagaaatgtcatcaaatccttgtattcctgtatggaaaaatgttatggacaaagtacattcgacaataaaaaagaaaaatagaagtatagatatagactatagcgtcagtgtgtcatcaggagtttcaaagtctaagaacaccgaaaataattcaggaagaagaaatagtggttcaaacaattcaagaggatctgacggcgaataagtttagctaattttgtttgttatattacaaactttgttaaatcgagtggagttatttatcttccactcgatttttattattttataattagaaaacagttatctaacataagtagacttttcctcttcccagctttctaatatttcatatataatttttattaccgtttcggcttgcgggcctgtaatagttccgctgatatattgactaagtgttgatggctgtaagttcttgaatcccctctttctgatagcatccaataaatccacttgtcttttttccagtcttagtaatctaattttgatttcatttaccaccataatcacctcactttaataaaaaactattgcatactcatgaaaaatatattataataattttgtcgaataaatttgccattgtatatgcgcaagttttcttttatttgtctaactttataaataagttattaatattataatacagaatatttctgtagtcaacaaaaatgcagattttatctgtaatttgttaatttatgacaaagaaggttaaactttttctaactttgtcggattttatttataaagtcttactataaacaagtgtgaattggaagaagctgatattatggaaatgataactggatccgaatttgcaaaaaaaattaaagaactagcattaaaaaacaataaatcaatcaaaaaagttttaaaagactgtggaattaatagaaactatatttatgatctagaaaataaaataaaatatcccgcatgggaaaaaataacagtaatagcagaatattttaaagtttctgccgacgatatactgggtattgacaataaaattcccagcgatgaatctatagaagacaattcagaattaaataataaattaacaaaaaatgaaaaagaacttttggaactagtaaatttaatctctgatgaaaaacttaaaactaaatttatcgaacaaattaaacctataattgaagaatacgcattaaataaacaaaaagatgaactagacaaaggcataaatgaaatattaaaaattgatactgaatacggagaaattgctgctaaaggacagtcggtcaaaaatttaaaatctaataagattgatgaaaacattgacaatatagattaatttataataaatttaattttatttaaatactttttgtcgttatcattatacataaatgggaggataatgatgacagcacaatattatgcaattcaaactttattacaatataatattaaagaatttcccatactcgttgacgacattgagtccatactgcttgacagaggctggataataaaaagttatgatattaattcttctgattatatagatatttttaaaagaatgggtgtacttgatatagccaaatattcacctgcattcagcattaaaacggataataatatgatacttttttatcgcaacaatttatcaaatgcaggaaaacgtttcgcattagctcacgaactcggtcacgatataatggggcatttttctaagcatggaatattaggttttcaagaaaatggacttcttgatgataaccaagaacgcgaagcaaacgaattcgctcttgaattccttgccccaatatgcgttttatctgtaaatcgtatatcaacagttgaagatatttctatgttttctttacttgataaaaaacattgttatgaaatattaacaaagattgataatcataataaatatagtaatgctgaaattgaactctgcaaaaaatttaaggcaattaaatcgcccgggaaatataaaaatataaaattaattatatcaacaagtgttttaacaataattattgttaccgttttatttatatttttatctcagttttatccatcccctataagtatccaagcaaatgaagctgatgattatgaatcttctcccacacctacattgagtatatctgaaacatccccttcaccgtcaattagtgtcaatcaagaaaaagtcggagtgaccaaaagcggaacaaaatatcatgaccttaactgcagttatataaaagataagcctaatataatatacatgactatagatgaagcaataaaatcaggctatcagccctgtggcaaatgcaaaccgaaataaatatattaaacttataacaaatatttttataagtctttataaaaatgctatgataagtattgataagaaaatatttaatgttttatttcataatttaatcatagcataagacgtatatattaacttattttatcaacttacaatgtactatatccaaaacatgtatttataaaattaatatgatagtaatcttagaatgtctgtgacaggctttggagtattaataatataaataatttattttattaattcttagacataatcaatatttatatgccagtcataaatttatactcatcccaatatatgcgcagtcgcaaaaaataatattataagaatcacttaattgactttattactttttttgcattttgaattaaatttaactattattgaatttctttttatcaaatgagattctaatttgattcactcaaatatttatactttttatcataacttaagtaggagcaacttctattgaataagacctaattataaacaattctaaaaactattgcttttaaagaaattaaatcacgatttgaaataaaatacaagaatatataaattcttgtattttattttttaattattatatacctatattatacaaaaattaattataaaatcttaagaagcattcttaagctgaagtcttaacttatctgctatcattgctataaattctgaatttgtcggctttccttttatttgtgatactgtgtaaccgaacacgttgttcagagtgtccatgtcacctctatcccacgctagctctatcgcatgtcttatcgctctttcaactctgcttgacgttgtgctgaagttctccgctatggttggatataattctttggttacagagttcattatgtccaaatcatatatcgccatcattattgcccttcttatgtattggtatccctttatatgcgccggtatgcctatctc
